United States Patent Application Publication US 2002/0061569 A1 - sequence listing, part 4

SEQ ID NO: 10095 - protein, 933 aa, Escherichia coli
MQNSALKAWLDSSYLSGANQSWIEQLYEDFLTDPDSVDANWRSTFQQLPGTGVKPDQFHSQTREYFRRLAKDASRYSSTISDPDTNVKQVKVLQLINAYRFRGHQHANLDPLGLWQQDKVADLDPSFHDLTEADFQETFNVGSFASGKETMKLGELLEALKQTYCGPIGAEYMHITSTEEKRWIQQRIESGRATFNSEEKKRFLSELTAAEGLERYLGAKFPGAKRFSLEGGDALIPMLKEMIRHAGNSGTREVVLGMAHRGRLNVLVNVLGKKPQDLFDEFAGKHKEHLGTGDVKYHMGFSSDFQTDGGLVHLALAFNPSHLEIVSPVVIGSVRARLDRLDEPSSNKVLPITIHGDAAVTGQGVVQETLNMSKARGYEVGGTVRIVINNQVGFTTSNPLDARSTPYCTDIGKMVQAPIFHVNADDPEAVAFVTRLALDFRNTFKRDVFIDLVCYRRHGHNEADEPSATQPLMYQKIKKHPTPRKIYADKLEQEKVATLEDATEMVNLYRDALDAGDCVVAEWRPMNMHSFTWSPYLNHEWDEEYPNKVEMKRLQELAKRISTVPEAVEMQSRVAKIYGDRQAMAAGEKLFDWGGAENLAYATLVDEGIPVRLSGEDSGRGTFFHRHAVIHNQSNGSTYTPLQHIHNGQGAFRVWDSVLSEEAVLAFEYGYATAEPRTLTIWEAQFGDFANGAQVVIDQFISSGEQKWGRMCGLVMLLPHGYEGQGPEHSSARLERYLQLCAEQNMQVCVPSTPAQVYHMLRRQALRGMRRPLVVMSPKSLLRHPLAVSSLEELANGTFLPAIGEIDELDPKGVKRVVMCSGKVYYDLLEQRRKNNQHDVAIVRIEQLYPFPHKAMQEVLQQFAHVKDFVWCQEEPLNQGAWYCSQHHFREVIPFGASLRYAGRPASASPAVGYMSVHQKQQQDLVNDALNVE

SEQ ID NO: 10096 - protein, 405 aa, Escherichia coli
MSSVDILVPDLPESVADATVATWHKKPGDAVVRDEVLVEIETDKVVLEVPASADGILDAVLEDEGTTVTSRQILGRLREGNSAGKETSAKSEEKASTPAQRQQASLEEQNNDALSPAIRRLLAEHNLDASAIKGTGVGGRLTREDVEKHLAKAPAKESAPAAAAPAAQPALAARSEKRVPMTRLRKRVAERLLEAKNSTAMLTTFNEVNMKPIMDLRKQYGEAFEKRHGIRLGFMSFYVKAVVEALKRYPEVNASIDGDDVVYHNYFDVSMAVSTPRGLVTPVLRDVDTLGMADIEKKIKELAVKGRDGKLTVEDLTGGNFTITNGGVFGSLMSTPIINPPQSAILGMHAIKDRPMAVNGQVEILPMMYLALSYDHRLIDGRESVGFLVTIKELLEDPTRLLLDV

SEQ ID NO: 10097 - protein, 289 aa, Escherichia coli
MSILIDKNTKVICQGFTGSQGTFHSEQAIAYGTKMVGGVTPGKGGTTHLGLPVFNTVREAVAATGATASVIYVPAPFCKDSILEAIDAGIKLIITITEGIPTLDMLTVKVKLDEAGVRMIGPNCPGVITPGECKIGIQPGHIHKPGKVGIVSRSGTLTYEAVKQTTDYGFGQSTCVGIGGDPIPGSNFIDILEMFEKDPQTEAIVMIGEIGGSAEEEAAAYIKEHVTKPVVGYIAGVTAPKGKRMGHAGAIIAGGKGTADEKFAALEAAGVKTVRSLADIGEALKTVLK

SEQ ID NO: 10098 - protein, 429 aa, Escherichia coli
MTTDDLAFDQRHIWHPYTSMTSPLPVYPVVSAEGCELILSDGRRLVDGMSSWWAAIHGYNHPQLNAAMKSQIDAMSHVMFGGITHAPAIELCRKLVAMTPQPLECVFLADSGSVAVEVAMKMALQYWQAKGEARQRFLTFRNGYHGDTFGAMSVCDPDNSMHSLWKGYLPENLFAPAPQSRMDGEWDERDMVGFARLMAAHRHEIAAVIIEPIVQGAGGMRMYHPEWLKRIRKICDREGILLIADEIATGFGRTGKLFACEHAEIAPDILCLGKALTGGTMTLSATLTTREVAETISNGEAGCFMHGPTFMGNPLACAAANASLAILESGDWQQQVADIEVQLREQLAPARDAEMVADVRVLGAIGVVETTHPVNMAALQKFFVEQGVWIRPFGKLIYLMPPYIILPQQLQRLTAAVNRAVQDETFFCQ

SEQ ID NO: 10099 - protein, 346 aa, Escherichia coli
MAHRPRWTLSQVTELFEKPLLDLLFEAQQVHRQHFDPRQVQVSTLLSIKTGACPEDCKYCPQSSRYKTGLEAERLMEVEQVLESARKAKAAGSTRFCMGAAWKNPHERDMPYLEQMVQGVKAMGLEACMTLGTLSESQAQRLANAGLDYYNHNLDTSPEFYGNIITTRTYQERLDTLEKVRDAGIKVCSGGIVGLGETVKDRAGLLLQLANLPTPPESVPINMLVKVKGTPLADNDDVDAFDFIRTIAVARIMMPTSYVRLSAGREQMNEQTQAMCFMAGANSIFYGCKLLTTPNPEEDKDLQLFRKLGLNPQQTAVLAGDNEQQQRLEQALMTPDTDEYYNAAAL

SEQ ID NO: 10100 - protein, 302 aa, Escherichia coli
MRNRTLADLDRVVALGGGHGLGRVLSSLSSLGSRLTGIVTTTDNGGSTGRIRRSEGGIAWGDMRNCLNQLITEPSVASAMFEYRFGGNGELSGHNLGNLMLKALDHLSVRPLEAINLIRNLLKVDTHLIPMSEHPVDLMAIDDQGHEVYGEVNIDQLTTPIQELLLTPNVPATREAVHAINEADLIIIGPGSFYTSLMPILLLKEIAQALRRTPAPMVYIGNLGRELSLPAANLKLESKLAIMEQYVGKKVIDAVIVGPKVDVSAVKERIVIQEVLEASDIPYRHDRQLLHNALEKALQALG

SEQ ID NO: 10101 - protein, 170 aa, Escherichia coli
MSQVSTEFIPTRIAILTVSNRRGEEDDTSGHYLRDSAQEAGHHVVDKAIVKENRYAIRAQVSAWIASDDVQVVLITGGTGLTEGDQAPEALLPLFDREVEGFGEVFRMLSFEEIGTSTLQSRAVAGVANKTLIFAMPGSTKACRTAWENIIAPQLDARTRPCNFHPHLKK

SEQ ID NO: 10102 - protein, 583 aa, Escherichia coli
MTRQDMNDAVITLNGLEKRFPGMDKPAVAPLDCTIHAGYVTGLVGPDGAGKTTLMRMLAGLLKPDSGSATVIGFDPIKNDGALHAVLGYMPQKFGLYEDLTVMENLNLYADLRSVTGEARKQTFARLLEFTSLGPFTGRLAGKLSGGMKQKLGLACTLVGEPKVLLLDEPGVGVDPISRRELWQMVHELAGEGMLILWSTSYLDEAEQCRDVLLMNEGELLYQGEPKALTQTMAGRSFLMTSPHEGNRKLLQRALKLPQVSDGMIQGKSVRLILKKEATPDDIRHADGMPEININETTPRFEDAFIDLLGGAGTSESPLGAILHTVEGTPGETVIEAKELTKKFGDFAATDHVNFAVKRGEIFGLLGPNGAGKSTTFKMMCGLLVPTSGQALVLGMDLKESSGKARQHLGYMAQKFSLYGNLTVEQNLRFFSGVYGLRGRAQNEKISRMSEAFGLKSIASHATDELPLGFKQRLALACSLMHEPDILFLDEPTSGVDPLTRREFWLHINSMVEKGVTVMVTTHFMDEAEYCDRIGLVYRGKLIASGTPDDLKAQSANDEQPDPTMEQAFIQLIHDWDKEHSNE

SEQ ID NO: 10103 - protein, 786 aa, Escherichia coli
MSATCLISLPPFHPKGRHTRFLSFKIAPPPASILIFLLYFLTGGVMRWILFILFCLLGAPAHAVSIPGVTTTTTTDSTTEPAPEPDIEQKKAAYGALADVLDNDTSRKELIDQLRTVAATPPAEPVPKIVPPTLVEEQTVLQKVTEVSRHYGEALSARFGQLYRNITGSPHKPFNPQTFSNALTHFSMLAVLVFGFYWLIRLCALPLYRKMGQWARQKNRERSNWLQLPAMIIGAFIIDLLLLALTLFVGQVLSDNLNAGSRTIAFQQSLFLNAFALIEFFKAVLRLIFCPNVAELRPFTIQDESARYWSRRLSWLSSLIGYGLIVAVPIISNQVNVQIGALANVIIMLCMTVWALYLIFRNKKEITQHLLNFAEHSLAFFSLFIRAFALVWHWLASAYFIVLFFFSLFDPGNSLKFMMGATVRSLAIIGIAAFVSGMFSRWLAKTITLSPHTQRNYPELQKRLNGWLSAALKTARILTVCVAVMLLLSAWGLFDFWNWLQNGAGQKTVDILIRIALILFFSAVGWTVLASLIENRLASDIHGRPLPSARTRTLLTLFRNALAVIISTITIMIVLSEIGVNIAPLLAGAGALGLAISFGSQTLVKDIITGVFIQFENGMNTGDLVTIGPLTGTVERMSIRSVGVRQDTGAYHIIPWSSITTFANFVRGIGSVVANYDVDRHEDADKANQALKDAVAELMENEEIRGLIIGEPNFAGIVGLSNTAFTLRVSFTTLPLKQWTVRFALDSQVKKHFDLAGVRAPVQTYQVLPAPGATPAEPLPPGEPTL

SEQ ID NO: 10104 - protein, 295 aa, Escherichia coli
MPGSLRKMPVWLPIVILLVAMASIQGGASLAKSLFPLVGAPGVTALRLALGTLILIAFFKPWRLRFAKEQRLPLLFYGVSLGGMNYLFYLSIQTVPLGIAVALEFTGPLAVALFSSRRPVDFVWVVLAVLGLWFLLPLGQDVSHVDLTGCALALGAGACWAIYILSGQRAGAEHGPATVAIGSLIAALIFVPIGALQAGEALWHWSVIPLGLAVAILSTALPYSLEMIALTRLPTRTFGTLMSMEPALAAVSGMIFLGETLTPIQLLALGAIIAASMGSTLTVRKESKIKELDIN

SEQ ID NO: 10105 - protein, 530 aa, Escherichia coli
MLVSSNVTMQFGSKPLFENISVKFGGGNRYGLIGANGSGKSTFMKILGGDLEPTLGNVSLDPNERIGKLRQDQFAFEEFTVLDTVIMGHKELWEVKQERDRIYALPEMSEEDGYKVADLEVKYGEMDGYSAEARAGELLLGVGIPVEQHYGPMSEVAPGWKLRVLLAQALFADPDILLLDEPTNNLDIDTIRWLEQVLNERDSTMIIISHDRHFLNMVCTHMADLDYGELRVYPGNYDEYMTAATQARERLLADNAKKKAQIAELQSFVSRFSANASKSRQATSRARQIDKIKLEEVKASSRQNPFIRFEQDKKLFRNALEVEGLTKGFDNGPLFKNLNLLLEVGEKLAVLGTNGVGKSTLLKTLVGDLQPDSGTVKWSENARIGYYAQDHEYEFENDLTVFEWMSQWKQEGDDEQAVRSILGRLLFSQDDIKKPAKVLSGGEKGRMLFGKLMMQKPNILIMDEPTNHLDMESIESLNMALELYQGTLIFVSHDREFVSSLATRILEITPERVIDFSGNYEDYLRSKGIE

SEQ ID NO: 10106 - protein, 411 aa, Escherichia coli
MEFTTGLMSLDTALNEMLSRVTPLTAQETLPLVQCFGRILASDVVSPLDVPGFDNSAMDGYAVRLADIASGQPLPVAGKSFAGQPYHGEWPAGTCIRIMTGAPVPEGCEAVVMQEQTEQMDNGVRFTAEVRSGQNIRRRGEDISAGAVVFPAGTRLTTAELPVIASLGIAEVPVIRKVRVALFSTGDELQLPGQPLGDGQIYDTNRLAVHLMLEQLGCEVINLGIIRDDPHALRAAFIEADSQADVVISSGGVSVGEADYTKTILEELGEIAFWKLAIKPGKPFAFGKLSNSWFCGLPGNPVSATLTFYQLVQPLLAKLSGNTASGLPARQRVRTASRLKKTPGRLDFQRGVLQRNADGELEVTTTGHQGSHIFSSFSLGNCFIVLERDRGNVEVGEWVEVEPFNALFGGL

SEQ ID NO: 10107 - protein, 612 aa, Escherichia coli
MLAVENLNIAFMQDQQKIAAVRNLSFSLQRGETLAIVGESGSGKSVTALALMRLLEQAGGLVQCDKMLLQRRSREVIELSEQNAAQMRHVRGADMAMIFQEPMTSLNPVFTVGEQIAESIRLHQNASREEAMVEAKRMLDQVRIPEAQTILSRYPHQLSGGMRQRVMIAMALSCRPAVLIADEPTTALDVTIQAQILQLIKVLQKEMSMGVIFITHDMGVVAEIADRVLVMYQGEAVETGTVEQIFHAPQHPYTRALLAAVPQLGAMKGLDYPRRFPLISLEHPAKQAPPIEQKTVVDGEPVLRVRNLVTRFPLRSGLLNRVTREVHAVEKVSFDLWPGETLSLVGESGSGKSTTGRALLRLVESQGGEIIFNGQRIDTLSPGKLQALRRDIQFIFQDPYASLDPRQTIGDSIIEPLRVHGLLPGKDAAARVAWLLERVGLLPEHAWRYPHEFSGGQRQRICIARALALNPKVIIADEAVSALDVSIRGQIINLLLDLQRDFGIAYLFISHDMAVVERISHRVAVMYLGQIVEIGPRRAVFENPQHPYTRKLLAAVPVAEPSRQRPQRVLLSDDLPSNIHLRGEEVAAVSLQCVGPGHYVAQPQSEYAFMRR

SEQ ID NO: 10108 - protein, 198 aa, Escherichia coli
MLENLNLSLFSLINATPDSAPWMISLAIFIAKDLITVVPLLAVVLWLWGLTAQRQLVIKIAIALAVSLFVSWTMGHLFPHDRPFVENIGYNFLHHAADDSFPSDHGTVIFTFALAFLCWHRLWSGSLLMVLAVVIAWSRVYLGVHWPLDMLGGLLAGMIGCLSAQIIWQAMGHKLYQRLQSWYRVCFALPIRKGWVRD

SEQ ID NO: 10109 - protein, 572 aa, Escherichia coli
MKQTVAAYIAKTLESAGVKRIWGVTGDSLNGLSDSLNRMGTIEWMSTRHEEVAAFAAGAEAQLSGELAVCAGSCGPGNLHLINGLFDCHRNHVPVLAIAAHIPSSEIGSGYFQETHPQELFRECSHYCELVSSPEQIPQVLAIAMRKAVLNRGVSVVVLPGDVALKPAPEGATMHWYHAPQPVVTPEEEELRKLAQLLRYSSNIALMCGSGCAGAHKELVEFAGKIKAPIVHALRGKEHVEYDNPYDVGMTGLIGFSSGFHTMMNADTLVLLGTQFPYRAFYPTDAKIIQIDINPASIGAHSKVDMALVGDIKSTLRALLPLVEEKADRKFLDKALEDYRDARKGLDDLAKPSEKAIHPQYLAQQISHFAADDAIFTCDVGTPTVWAARYLKMNGKRRLLGSFNHGSMANAMPQALGAQATEPERQVVAMCGDGGFSMLMGDFLSVVQMKLPVKIVVFNNSVLGFVAMEMKAGGYLTDGTELHDTNFARIAEACGITGIRVEKASEVDEALQRAFSIDGPVLVDVVVAKEELAIPPQIKLEQAKGFSLYMLRAIISGRGDEVIELAKTNWLR

SEQ ID NO: 10110 - protein, 758 aa, Escherichia coli
MLNQELELSLNMAFARAREHRHEFMTVEHLLLALLSNPSAREALEACSVDLVALRQELEAFIEQTTPVLPASEEERDTQPTLSFQRVLQRAVFHVQSSGRNEVTGANVLVAIFSEQESQAAYLLRKHEVSRLDVVNFISHGTRKDEPTQSSDPGSQPNSEEQAGGEERMENFTTNLNQLARVGGIDPLIGREKELERAIQVLCRRRKNNPLLVGESGVGKTAIAEGLAWRIVQGDVPEVMADCTIYSLDIGSLLAGTKYRGDFEKRFKALLKQLEQDTNSILFIDEIHTIIGAGAASGGQVDAANLIKPLLSSGKIRVIGSTTYQEFSNIFEKDRALARRFQKIDITEPSIEETVQIINGLKPKYEAHHDVRYTAKAVRAAVELAVKYINDRHLPDKAIDVIDEAGARARLMPVSKRKKTVNVADIESVVARIARIPEKSVSQSDRDTLKNLGDRLKMLVFGQDKAIEALTEAIKMARAGLGHEHKPVGSFLFAGPTGVGKTEVTVQLSKALGIELLRFDMSEYMERHTVSRLIGAPPGYVGFDQGGLLTDAVIKHPHAVLLLDEIEKAHPDVFNILLQVMDNGTLTDNNGRKADFRNVVLVMTTNAGVRETERKSIGLIHQDNSTDAMEEIKKIFTPEFRNRLDNIIWFDHLSTDVIHQVVDKFIVELQVQLDQKGVSLEVSQEARNWLAEKGYDRAMGARPMARVIQDNLKKPLANELLFGSLVDGGQVTVALDKEKNELTYGFQSAQKHKAEAAH

SEQ ID NO: 10111 - protein, 72 aa, Escherichia coli
MAKEDNIEMQGTVLETLPNTMFRVELENGHVVTAHISGKMRKNYIRILTGDKVTVELTPYDLSKGRIVFRSR

SEQ ID NO: 10112 - protein, 1329 aa, Escherichia coli
MSQEYIEDKEVTLTKLSSGRRLLEALLILIVLFAVWLMAALLSFNPSDPSWSQTAWHEPIHNLGGMPGAWLADTLFFIFGVMAYTIPVIIVGGCWFAWRHQSSDEYIDYFAVSLRIIGVLALILTSCGLAAINADDIWYFASGGVIGSLLSTTLQPLLHSSGGTIALLCVWAAGLTLFTGWSWVTIAEKLGGWILNILTFASNRTRRDDTWVDEDEYEDDEEYEDENHGKQHESRRARILRGALARRKRLAEKFINPMGRQTDAALFSGKRMDDDEEITYTARGVAADPDDVLFSGNRATQPEYDEYDPLLNGAPITEPVAVAAAATTATQSWAAPVEPVTQTPPVASVDVPPAQPTVAWQPVPGPQTGEPVIAPAPEGYPQQSQYAQPAVQYNEPLQQPVQPQQPYYAPAAEQPAQQPYYAPAPEQPVAGNAWQAEEQQSTFAPQSTYQTEQTYQQPAAQEPLYQQPQPVEQQPVVEPEPVVEETKPARPPLYYFEEVEEKRAREREQLAAWYQPIPEPVKEPEPIKSSLKAPSVAAVPPVEAAAAVSPLASGVKKATLATGAAATVAAPVFSLANSGGPRPQVKEGIGPQLPRPKRIRVPTRRELASYGIKLPSQRAAEEKAREAQRNQYDSGDQYNDDEIDAMQQDELARQFAQTQQQRYGEQYQHDVPVNAEDADAAAEAELARQFAQTQQQRYSGEQPAGANPFSLDDFEFSPMKALLDDGPHEPLFTPIVEPVQQPQQPVAPQQQYQQPQQPVPPQPQYQQPQQPVAPQPQYQQPQQPVAPQQQYQQPQQPVAPQQQYQQPQQPVAPQPQDTLLHPLLMRNGDSRPLHKPTTPLPSLDLLTPPPSEVEPVDTFALEQMARLVEARLADFRIKADVVNYSPGPVITRFELNLAPGVKAARISNLSRDLARSLSTVAVRVVEVIPGKPYVGLELPNKKRQTVYLREVLDNAKFRDNPSPLTVVLGKDIAGEPVVADLAKMPHLLVAGTTGSGKSVGVNAMILSMLYKAQPEDVRFIMIDPKMLELSVYEGIPHLLTEVVTDMKDAANALRWCVNEMERRYKLMSALGVRNLAGYNEKIAEADRMMRPIPDPYWKPGDSMDAQHPVLKKEPYIVVLVDEFADLMMTVGKKVEELIARLAQKARAAGIHLVLATQRPSVDVITGLIKANIPTRIAFTVSSKIDSRTILDQAGAESLLGMGDMLYSGPNSTLPVRVHGAFVRDQEVHAVVQDWKARGRPQYVDGITSDSESEGGAGGFDGAEELDPLFDQAVQFVTEKRKASISGVQRQFRIGYNRAARIIEQMEAQGIVSEQGHNGNREVLAPPPFD

SEQ ID NO: 10113 - protein, 285 aa, Escherichia coli
MKADNPFDLLLPAAMAKVAEEAGVYKATKHPLKTFYLAITAGVFISIAFVFYITATTGTGTMPFGMAKLVGGICFSLGLILCVVCGADLFTSTVLIVVAKASGRITWGQLAKNWLNVYFGNLVGALLFVLLMWLSGEYMTANGQWGLNVLQTADHKVHHTFIEAVCLGILANLMVCLAVWMSYSGRSLMDKAFIMVLPVAMFVASGFEHSIANMFMIPMGIVIRDFASPEFWTAVGSAPENFSHLTVMNFITDNLIPVTIGNIIGGGLLVGLTYWVIYLRENDHH

SEQ ID NO: 10114 - protein, 557 aa, Escherichia coli
MTESFAQLFEESLKEIETRPGSIVRGVVVAIDKDVVLVDAGLKSESAIPAEQFKNAQGELEIQVGDEVDVALDAVEDGFGETLLSREKAKRHEAWITLEKAYEDAETVTGVINGKVKGGFTVELNGIRAFLPGSLVDVRPVRDTLHLEGKELEFKVIKLDQKRNNVVVSRRAVIESENSAERDQLLENLQEGMEVKGIVKNLTDYGAFVDLGGVDGLLHITDMAWKRVKHPSEIVNVGDEITVKVLKFDRERTRVSLGLKQLGEDPWVAIAKRYPEGTKLTGRVTNLTDYGCFVEIEEGVEGLVHVSEMDWTNKNIHPSKVVNVGDVVEVMVLDIDEERRRISLGLKQCKANPWQQFAETHNKGDRVEGKIKSITDFGIFIGLDGGIDGLVHLSDISWNVAGEEAVREYKKGDEIAAVVLQVDAERERISLGVKQLAEDPFNNWVALNKKGAIVTGKVTAVDAKGATVELADGVEGYLRASEASRDRVEDATLVLSVGDEVEAKFTGVDRKNRAISLSVRAKDEADEKDAIATVNKQEDANFSNNAMAEAFKAAKGE

SEQ ID NO: 10115 - protein, 582 aa, Escherichia coli
MHNDKDLSTWQTFRRLWPTIAPFKAGLIVAGVALILNAASDTFMLSLLKPLLDDGFGKTDRSVLVWMPLVVIGLMILRGITSYVSSYCISWVSGKVVMTMRRRLFGHMMGMPVSFFDKQSTGTLLSRITYDSEQVASSSSGALITVVREGASIIGLFIMMFYYSWQLSIILIVLAPIVSIAIRVVSKRFRNISKNMQNTMGQVTTSAEQMLKGHKEVLIFGGQEVETKRFDKVSNRMRLQGMKMVSASSISDPIIQLIASLALAFVLYAASFPSVMDSLTAGTITVVFSSMIALMRPLKSLTNVNAQFQRGMAACQTLFTILDSEQEKDEGKRVIERATGDVEFRNVTFTYPGRDVPALRNINLKIPAGKTVALVGRSGSGKSTIASLITRFYDIDEGEILMDGHDLREYTLASLRNQVALVSQNVHLFNDTVANNIAYARTEQYSREQIEEAARMAYAMDFINKMDNGLDTVIGENGVLLSGGQRQRIAIARALLRDSPILILDEATSALDTESERAIQAALDELQKNRTSLVIAHRLSTIEKADEIVVVEDGVIVERGTHNDLLEHRGVYAQLHKMQFGQ

SEQ ID NO: 10116 - protein, 333 aa, Escherichia coli
MFRFLTFCLCEVMPMRNIIKLALAGLLSVSTFAVAAESSPEALRIGYQKGSIGMVLAKSHQLLEKRYPESKISWVEFPAGPQMLEALNVGSIDLGSTGDIPPIFAQAAGADLVYVGVEPPKPKAEVILVAENSPIKTVADLKGHKVAFQKGSSSHNLLLRALRQAGLKFTDIQPTYLTPADARAAFQQGNVDAWAIWDPYYSAALLQGGVRVLKDGTDLNQTGSFYLAARPYAEKNGAFIQGVLATFSEADALTRSQREQSIALLAKTMGLPAPVIASYLDHRPPTTIKPVNAEVAALQQQTADLFYENRLVPKKVDIRQRIWQPTQLEGKQL

SEQ ID NO: 10117 - protein, 702 aa, Escherichia coli
MNSLFASTARGLEELLKTELENLGAVECQVVQGGVHFKGDTRLVYQSLMWSRLASRIMLPLGECKVYSDLDLYLGVQAINWTEMFNPGATFAVHFSGLNDTIRNSQYGAMKVKDAIVDAFTRKNLPRPNVDRDAPDIRVNVWLHKETASIALDLSGDGLHLRGYRDRAGIAPIKETLAAAIVMRSGWQPGTPLLDPMCGSGTLLIEAAMLATDRAPGLHRGRWGFSGWAQHDEAIWQEVKAEAQTRARKGLAEYSSHFYGSDSDARVIQRARTNARLAGIGELITFEVKDVAQLTNPLPKGPYGTVLSNPPYGERLDSEPALIALHSLLGRIMKNQFGGWNLSLFSASPDLLSCLQLRADKQYKAKNGPLDCVQKNYHVAESTPDSKPAMVAEDYTNRLRKNLKKFEKWARQEGIECYRLYDADLPEYNVAVDRYADWVVVQEYAPPKTIDAHKARQRLFDIIAATISVLGIAPNKLVLKTRERQKGKNQYQKLGEKGEFLEVTEYNAHLWVNLTDYLDTGLFLDHRIARRMLGQMSKGKDFLNLFSYTGSATVHAGLGGARSTTTVDMSRTYLEWAERNLRLNGLTGRAHRLIQADCLAWLREANEQFDLIFIDPPTFSNSKRMEDAFDVQRDHLALMKDLKRLLRAGGTIMFSNNKRGFRMDLDGLAKLGLKAQEITQKTLSQDFARNRQIHNCWLITAA

SEQ ID NO: 10118 - protein, 367 aa, Escherichia coli
MEGKASLGETIDIVDHQGKWLARGAYSPASQIRARVWTFDPSESIDIAFFSRRLQQAQKWRDWLAQKDGLDSYRLIAGESDGLPGITIDRFGNFLVLQLLSAGAEYQRAALISALQTLYPECSIYDRSDVAVRKKEGMELTQGPVTGELPPALLPIEEHGMKLLVDIQHGHKTGYYLDQRDSRLATRRYVENKRVLNCFSYTGGFAVSALMGGCSQVVSVDTSQEALDIARQNVELNKLDLSKAEFVRDDVFKLLRTYRDRGEKFDVIVMDPPKFVENKSQLMGACRGYKDINMLAIQLLNEGGILLTFSCSGLMTSDLFQKIIADAAIDAGRDVQFIEQFRQAADHPVIATYPEGLYLKGFACRVM

SEQ ID NO: 10119 - protein, 244 aa, Escherichia coli
MPRPSTCADSGGGMMTTLTARPEAITFDPQQSALIVVDMQNAYATPGGYLDLAGFDVSTTRPVIANIQTAVTAARAAGMLIIWFQNGWDEQYVEAGGPGSPNFHKSNALKTMRKQPQLQGKLLAKGSWDYQLVDELVPQPGDIVLPKPRYSGFFNTPLDSILRSRGIRHLVFTGIATNVCVESTLRDGFFLEYFGVVLEDATHQAGPKFAQKAALFNIETFFGWVSDVETFCDALSPTSFAHIA

SEQ ID NO: 10120 - protein, 39 aa, Escherichia coli
MGGMFVPFLIMLREGLEAALIVSLIASYLKRTQRGRWIV

SEQ ID NO: 10121 - protein, 423 aa, Escherichia coli
MQYKDENGVNEPSRRRLLKVIGALALAGSCPVAHAQKTQSAPGTLSPDARNEKQPFYGEHQAGILTPQQAAMMLVAFDVLASDKADLERLFRLLTQRFAFLTQGGAAPETPNPRLPPLDSGILGGYIAPDNLTITLSVGHSLFDERFGLAPQMPKKLQKMTRFPNDSLDAALCHGDVLLQICANTQDTVIHALRDIIKHTPDLLSVRWKREGFISDHAARSKGKETPINLLGFKDGTANPDSQNDKLMQKVVWVTADQQEPAWTIGGSYQAVRLIQFRVEFWDRTPLKEQQTIFGRDKQTGAPLGMQHEHDVPDYASDPEGKVIALDSHIRLANPRTAESESSLMLRRGYSYSLGVTNSGQLDMGLLFVCYQHDLEKGFLTVQKRLNGEALEEYVKPIGGGYFFALPGVKDANDYFGSALLRV

SEQ ID NO: 10122 - protein, 350 aa, Escherichia coli
MPVLHNRISNDALKAKMLAESEPRTTISFYKYFHIADPKATRDALYQLFTALNVFGRVYLAHEGINAQISVPASNVETFRAQLYAFDPALEGLRLNIALDDDGKSFWVLRMKVRDRIVADGIDDPHFDASNVGEYLQAAEVNAMLDDPDALFIDMRNHYEYEVGHFENALEIPADTFREQLPKAVEMMQAHKDKKIVMYCTGGIRCEKASAWMKHNGFNKVWHIEGGIIEYARKAREQGLPVRFIGKNFVFDERMGERISDEIIAHCHQCGAPCDSHTNCKNDGCHLLFIQCPVCAEKYKGCCSEICCEESALPPEEQRRRRAGRENGNKIFNKSRGRLNTTLCIPDPTE

SEQ ID NO: 10123 - protein, 191 aa, Escherichia coli
MKKSLLGLTFASLMFSAGSAVAADYKIDKEGQHAFVNFRIQHLGYSWLYGTFKDFDGTFTFDEKNPAADKVNVTINTTSVDTNHAERDKHLRSADFLNTAKYPQATFTSTSVKKDGDELDITGDLTLNGVTKPVTLEAKLIGQGDDPWGGKRAGFEAEGKIKLKDFNIKTDLGPASQEVDLIISVEGVQQK

SEQ ID NO: 10124 - protein, 317 aa, Escherichia coli
MYTKIIGTGSYLPEQVRTNADLEKMVDTSDEWIVTRTGIRERHIAAPNETVSTMGFEAATRAIEMAGIEKDQIGLIVVATTSATHAFPSAACQIQSMLGIKGCPAFDVAAACAGFTYALSVADQYVKSGAVKYALVVGSDVLARTCDPTDRGTIIIFGDGAGAAVLAASEEPGIISTHLHADGSYGELLTLPNADRVNPENSIHLTMAGNEVFKVAVTELAHIVDETLAANNLDRSQLDWLVPHQANLRIISATAKKLGMSMDNVVVTLDRHGNTSAASVPCALDEAVRDGRIKPGQLVLLEAFGGGFTWGSALVRF

SEQ ID NO: 10125 - protein, 309 aa, Escherichia coli [sequence omitted]

SEQ ID NO: 10126 - protein, 244 aa, Escherichia coli
MNFEGKIALVTGASRGIGRAIAETLAARGAKVIGTATSENGAQAISDYLGANGKGLMLNVTDPASIESVLEKIRAEFGEVDILVNNAGITRDNLLMRMKDEEWNDIIETNLSSVFRLSKAVMRAMMKKRHGRIITIGSVVGTMGNGGQANYAAAKAGLIGFSKSLAREVASRGITVNVVAPGFIETDMTRALSDDQRAGILAQVPAGRLGGAQEIANAVAFLASDEAAYITGETLHVNGGMYMV

SEQ ID NO: 10127 - protein, 78 aa, Escherichia coli
MSTIEERVKKIIGEQLGVKQEEVTNNASFVEDLGADSLDTVELVMALEEEFDTEIPDEEAEKITTVQAAIDYINGHQA

SEQ ID NO: 10128 - protein, 413 aa, Escherichia coli
MSKRRVVVTGLGMLSPVGNTVESTWKALLAGQSGISLIDHFDTSAYATKFAGLVKDFNCEDIISRKEQRKMDAFIQYGIVAGVQAMQDSGLEITEENATRIGAAIGSGIGGLGLIEENHTSLMNGGPRKISPFFVPSTIVNMVAGHLTIMYGLRGPSISIATACTSGVHNIGHAARIIAYGDADVMVAGGAEKASTPLGVGGFGAARALSTRNDNPQAASRPWDKERDGFVLGDGAGMLVLEEYEHAKKRGAKIYAELVGFGMSSDAYHMTSPPENGAGAALAMANALRDAGIEASQIGYVNAHGTSTPAGDKAEAQAVKTIFGEAASRVLVSSTKSMTGHLLGAAGAVESIYSILALRDQAVPPTINLDNPDEGCDLDFVPHEARQVSGMEYTLCNSFGFGGTNGSLIFKKI

SEQ ID NO: 10129 - protein, 213 aa, Escherichia coli
MRSKYIVIEGLEGAGKTTARNVVVETLEQLGIRDMVFTREPGGTQLAEKLRSLVLDIKSVGDEVITDKAEVLMFYAARVQLVETVIKPALANGTWVIGDRHDLSTQAYQGGGRGIDQHMLATLRDAVLGDFRPDLTLYLDVTPEVGLKRARARGELDRIEQESFDFFNRTRARYLELAAQDKSIHTIDATQPLEAVMDAIRTTVTHWVKELDA

SEQ ID NO: 10130 - protein, 265 aa, Escherichia coli
MFLVDSHCHLDGLDYESLHKDVDDVLAKAAARDVKFCLAVATTLPGYLHMRDLVGERDNVVFSCGVHPLNQNDPYDVEDLRRLAAEEGVVALGETGLDYYYTPETKVRQQESFIHHIQIGRELNKPVIVHTRDARADTLAILREEKVTDCGGVLHCFTEDRETAGKLLDLGFYISFSGIVTFRNAEQLRDAARYVPLDRLLVETDSPYLAPVPHRGKENQPAMVRDVAEYMAVLKGVAVEELAQVTTDNFARLFHIDASRLQSIR

SEQ ID NO: 10131 - protein, 477 aa, Escherichia coli
MFKNAFANLQKVGKSLMLPVSVLPIAGILLGVGSANFSWLPAVVSHVMAEAGGSVFANMPLIFAIGVALGFTNNDGVSALAAVVAYGIMVKTMAVVAPLVLHLPAEEIASKHLADTGVLGGIISGAIAAYMFNRFYRIKLPEYLGFFAGKRFVPIISGLAAIFTGVVLSFIWPPIGSAIQTFSQWAAYQNPVVAFGIYGFIERCLVPFGLHHIWNVPFQMQIGEYTNAAGQVFHGDIPRYMAGDPTAGKLSGGFLFKMYGLPAAAIAIWHSAKPENRAKVGGIMISAALTSFLTGITEPIEFSFMFVAPILYIIHAILAGLAFPICILLGMRDGTSFSHGLIDFIVLSGNSSKLWLFPIVGIGYAIVYYTIFRVLIKALDLKTPGREDATEDAKATGTSEMAPALVAAFGGKENITNLDACITRLRVSVADVSKVDQAGLKKLGAAGVVVAGSGVQAIFGTKSDNLKTEMDEYIRNH

SEQ ID NO: 10132 - protein, 729 aa, Escherichia coli
MLSTQFNRDNQYQAITKPSLLAGCIALALLPSAAFAAPATEETVIVEGSATAPDDGENDYSVTSTSAGTKMQMTQRDIPQSVTIVSQQRMEDQQLQTLGEVMENTLGISKSQADSDRALYYSRGFQIDNYMVDGIPTYFESRWNLGDALSDMALFERVEVVRGATGLMTGTGNPSAAINMVRKHATSREFKGDVSAEYGSWNKERYVADLQSPLTEDGKIRARIVGGYQNNDSWLDRYNSEKTFFSGIVDADLGDLTTLSAGYEYQRIDVNSPTWGGLPRWNTDGSSNSYDRARSTAPDWAYNDKEINKVFMTLKQQFADTWQATLNATHSEVEFDSKMMYVDAYVNKADGMLVGPYSNYGPGFDYVGGTGWNSGKRKVDALDLFADGSYELFGRQHNLMFGGSYSKQNNRYFSSWANIFPDEIGSFYNFNGNFPQTDWSPQSLAQDDTTHMKSLYAATRVTLADPLHLILGARYTNWRVDTLTYSMEKNHTTPYAGLVFDINDNWSTYASYTSIFQPQNDRDSSGKYLAPITGNNYELGLKSDWMNSRLTTTLAIFRIEQDNVAQSTGTPIPGSNGETAYKAVDGTVSKGVEFELNGAITDNWQLTFGATRYIAEDNEGNAVNPNLPRTTVKMFTSYRLPVMPELTVGGGVNWQNRVYTDTVTPYGTFRAEQGSYALVDLFTRYQVTKNFSLQGNVNNLFDKTYDTNVEGSIVYGTPRNFSITGTYQF

SEQ ID NO: 10133 - protein, 434 aa, Escherichia coli
MTTPLKKIVIVGGGAGGLEMATQLGHKLGRKKKAKITLVDRNHSHLWKPLLHEVATGSLDEGVDALSYLAHARNHGFQFQLGSVIDIDREAKTITIAELRDEKGELLVPERKIAYDTLVMALGSTSNDFNTPGVKENCIFLDNPHQARRFHQEMLNLFLKYSANLGANGKVNIAIVGGGATGVELSAELHNAVKQLHSYGYKGLTNEALNVTLVEAGERILPALPPRISAAAHNELTKLGVRVLTQTMVTSADEGGLHTKDGEYIEADLMVWAAGIKAPDFLKDIGGLETNRINQLVVEPTLQTTRDPDIYAIGDCASCPRPEGGFVPPRAQAAHQMATCAMNNILAQMNGKPLKNYQYKDHGSLVSLSNFSTVGSLMGNLTRGSMMIEGRIARFVYISLYRMHQIALHGYFKTGLMMLVGSINRVIRPRLKLH

SEQ ID NO: 10134 - protein, 1148 aa, Escherichia coli
MPEQYRYTLPVKAGEQRLLGELTGAACATLVAEIAERHAGPVVLIAPDMQNALRLHDEISQFTDQMVMNLADWETLPYDSFSPHQDIISSRLSTLYQLPTMQRGVLIVPVNTLMQRVCPHSFLHGHALVMKKGQRLSRDALRTQLDSAGYRHVDQVMEHGEYATRGALLDLFPMGSELPYRLDFFDDEIDSLRVFDVDSQRTLEEVEAINLLPAHEFPTDKAAIELFRSQWRDTFEVKRDPEHIYQQVSKGTLPAGIEYWQPLFFSEPLPPLFSYFPANTLLVNTGDLETSAERFQADTLARFENRGVDPMRPLLPPQSLWLRVDELFSELKNWPRVQLKTEHLPTKAANANLGFQKLPDLAVQAQQKAPLDALRKFLETFDGPVVFSVESEGRREALGELLARIKIAPQRIMRLDEASDRGRYLMIGAAEHGFVDTVRNLALICESDLLGERVARRRQDSRRTINPDTLIRNLAELHIGQPVVHLEHGVGRYAGMTTLEAGGITGEYLMLTYANDAKLYVPVSSLHLISRYAGGAEENAPLHKLGGDAWSRARQKAAEKVRDVAAELLDIYAQRAAKEGFAFKHDREQYQLFCDSFPFETTPDQAQAINAVLSDMCQPLAMDRLVCGDVGFGKTEVAMRAAFLAVDNHKQVAVLVPTTLLAQQHYDNFRDRFANWPVRIEMISRFRSAKEQTQILAEVAEGKIDILIGTHKLLQSDVKFKDLGLLIVDEEHRFGVRHKERIKAMRANVDILTLTATPIPRTLNMAMSGMRDLSIIATPPARRLAVKTFVREYDSMVVREAILREILRGGQVYYLYNDVENIQKAAERLAELVPEARIAIGHGQMRERELERVMNDFHHQRFNVLVCTTIIETGIDIPTANTIIIERADHFGLAQLHQLRGRVGRSHHQAYAWLLTPHPKAMTTDAQKRLEAIASLEDLGAGFALATHDLEIRGAGELLGEEQSGSMETIGFSLYMELLENAVDALKAGREPSLEDLTSQQTEVELRMPSLLPDDFIPDVNTRLSFYKRIASAKTENELEEIKVELIDRFGLLPDPARTLLDIARLRQQAQKLGIRKLEGNEKGGVIEFAEKNHVNPAWLIGLLQKQPQHYRLDGPTRLKFIQDLSERKTRIEWVRQFMRELEENAIA

SEQ ID NO: 10135 - protein, 228 aa, Escherichia coli
MQCDNLCKRYQEGSVQTDVLHNVSFSVGEGEMMAIVGSSGSGKSTLLHLLGGLDTPTSGDVIFNGQPMSKLSSAAKAELRNQKLGFIYQFHHLLPDFTALENVAMPLLIGKKKPAEINSRALEMLKAVGLDHRANHRPSELSGGERQRVAIARALVNNPRLVLADEPTGNLDARNADSIFQLLGELNRLQGTAFLVVTHDLQLAKRMSRQLEMRDGRLTAELSLMGAE

SEQ ID NO: 10136 - protein, 408 aa, Escherichia coli
MDKLLERFLNYVSLDTQSKAGVRQVPSTEGQWKLLHLLKEQLEEMGLINVTLSEKGTLMATLPANVPGDIPAIGFISHVDTSPDCSGKNVNPQIVENYRGGDIALGIGDEVLSPVMFPVLHQLLGQTLITTDGKTLLGADDKAGIAEIMTALAVLQQKKIPHGDIRVAFTPDEEVGKGAKHFDVDAFDARWAYTVDGGGVGELEFENFNAASVNIKIVGNNVHPGTAKGVMVNALSLAARIHAEVPADESPEMTEGYEGFYHLASMKGTVERADMHYIIRDFDRKQFEARKRKMMEIAKKVGKGLHPDCYIELVIEDSYYNMREKVVEHPHILDIAQQAMRDCDIEPELKPIRGGTDGAQLSFMGLPCPNLFTGGYNYHGKHEFVTLEGMEKAVQVIVRIAELTAQRK

SEQ ID NO: 10137 - protein, 456 aa, Escherichia coli
MELSSLTAVSPVDGRYGDKVSALRGIFSEYGLLKFRVQVEVRWLQKLAAHAAIKEVPAFAADAIGYLDAIVASFSEEDAARIKTIERTTNHDVKAVEYFLKEKVAEIPELHAVSEFIHFACTSEDINNLSHALMLKTARDEVILPYWRQLIDGIKDLAVQYRDIPLLSRTHGQPATPSTIGKEMANVAYRMERQYRQLNQVEILGKINGAVGNYNAHIAAYPEVDWHQFSEEFVTSLGIQWNPYTTQIEPHDYIAELFDCVARFNTILIDFDRDVWGYIALNHFKQKTIAGEIGSSTMPHKVNPIDFENSEGNLGLSNAVLQHLASKLPVSRWQRDLTDSTVLRNLGVGIGYALIAYQSTLKGVSKLEVNRDHLLDELDHNWEVLAEPIQTVMRRYGIEKPYEKLKELTRGKRVDAEGMKQFIDGLALPEEEKARLKAMTPANYIGRAITMVDELK

SEQ ID NO: 10138 - protein, 383 aa, Escherichia coli
MIEYAALKFNVVSDPMSETAKKVIVGMSGGVDSSVSAWLLQQQGYQVEGLFMKNWEEDDGEEYCTAAADLADAQAVCDKLGIELHTVNFAAEYWDNVFELFLAEYKAGRTPNPDILCNKEIKFKAFLEFAAEDLGADYIATGHYVRRADVDGKSRLLRGLDSNKDQSYFLYTLSHEQIAQSLFPVGELEKPQVRKIAEDLGLVTAKKKDSTGICFIGERKFREFLGRYLPAQPGKIITVDGDEIGEHQGLMYHTLGQRKGLGIGGTKEGTEEPWYVVDKDVENNILVVAQGHEHPRLMSVGLIAQQLHWVDREPFTGTMRCTVKTRYRQTDIPCTVKALDDDRIEVIFDEPVAAVTPGQSAVFYNGEVCLGGGIIEQRLPLPV

SEQ ID NO: 10139 - protein, 416 aa, Escherichia coli
MESKVVVPAQGKKITLQNGKLNVPENPIIPYIEGDGIGVDVTPAMLKVVDAAVEKAYKGERKISWMEIYTGEKSTQVYGQDVWLPAETLDLIREYRVAIKGPLTTPVGGGIRSLNVALRQELDLYICLRPVRYYQGTPSPVKHPELTDMVIFRENSEDIYAGIEWKADSADAEKVIKFLREEMGVKKIRFPEHCGIGIKPCSEEGTKRLVRAAIEYAIANDRDSVTLVHKGNIMKFTEGAFKDWGYQLAREEFGGELIDGGPWLKVKNPNTGKEIVIKDVIADAFLQQILLRPAEYDVIACMNLNGDYISDALAAQVGGIGIAPGANIGDECALFEATHGTAPKYAGQDKVNPGSIILSAEMMLRHMGWTEAADLIVKGMEGAINAKTVTYDFERLMDGAKLLKCSEFGDAIIENM

SEQ ID NO: 10140 - protein, 219 aa, Escherichia coli
MYQHHNWQGALLDYPVSKVVCVGSNYAKHIKEMGSAVPEEPVLFIKPETALCDLRQPLAIPSDFGSVHHEVELAVLIGATLRQATEEHVRKAIAGYGVALDLTLRDVQGKMKKAGQPWEKAKAFDNSCPLSGFIPAAEFTGDPQNTTLSLSVNGEQRQQGTTADMIHKIVPLIAYMSKFFTLKAGDVVLTGTPDGVGPLQSGDELTVTFDGHSLTTRVL

SEQ ID NO: 10141 - protein, 363 aa, Escherichia coli
MGFKCGIVGLPNVGKSTLFNALTKAGIEAANFPFCTIEPNTGVVPMPDPRLDQLAEIVKPQRTLPTTMEFVDIAGLVKGASKGEGLGNQFLTNIRETEAIGHVVRCFENDNIIHVSGKVNPADDIEVINTELALADLDTCERAIHRVQKKAKGGDKDAKAELAVLEKCLPQLENAGMLRALDLSAEEKAAIRYLSFLTLKPTMYIANVNEDGFENNPYLDQVREIAAKEGSVVVPVCAAVEADIAELDDEERDEFMQELGLEEPGLNRVIRAGYKLLNLQTYFTAGVKEVRAWTIPVGATAPQAAGKIHTDFEKGFIRAQTISFEDFITYKGEQGAKEAGKMRAEGKDYIVKDGDVMNFLFNV

SEQ ID NO: 10142 - protein, 315 aa, Escherichia coli
MPDMKLFAGNATPELAQRIANRLYTSLGDAAVGRFSDGEVSVQINENVRGGDIFIIQSTCAPTNDNLMELVVMVDALRRASAGRITAVIPYFGYARQDRRVRSARVPITAKVVADFLSSVGVDRVLTVDLHAEQIQGFFDVPVDNVFGSPILLEDMLQLNLDNPIVVSPDIGGVVRARAIAKLLNDTDMAIIDKRRPRANVSQVMHIIGDVAGRDCVLVDDMIDTGGTLCKAAEALKERGAKRVFAYATHPIFSGNAANNLRNSVIDEVVVCDTIPLSDEIKSLPNVRTLTLSGMLAEAIRRISNEESISAMFEH

SEQ ID NO: 10143 - protein, 360 aa, Escherichia coli
MKPSIVAKLEALHERHEEVQALLGDAQTIADQERFRALSREYAQLSDVSRCFTDWQQVQEDIETAQMMLDDPEMREMAQDELREAKEKSEQLEQQLQVLLLPKDPDDERNAFLEVRAGTGGDEAALFAGDLFRMYSRYAEARRWRVEIMSASEGEHGGYKEIIAKISGDGVYGRLKFESGGHRVQRVPATESQGRIHTSACTVAVMPELPDAELPDINPADLRIDTFRSSGAGGQHVNTTDSAIRITHLPTGIVVECQDERSQHKNKAKALSVLGARIHAAEMAKRQQAEASTRRNLLGSGDRSDRNRTYNFPQGRVTDHRINLTLYRLDEVMEGKLDMLIEPIIQEHQADQLAALSEQE

SEQ ID NO: 10144 - protein, 463 aa, Escherichia coli
MSHSSAPERATGAVITDWRPEDPAFWQQRGQRIASRNLWISVPCLLLAFCVWMLFSAVAVNLPKVGFNFTTDQLFMLTALPSVSGALLRVPYSFMVPIFGGRRWTAFSTGILIIPCVWLGFAVQDTSTPYSVFIIISLLCGFAGANFASSMANISFFFPKQKQGGALGLNGGLGNMGVSVMQLVAPLVVSLSIFAVFGSQGVKQPDGTELYLANASWIWVPFLAIFTIAAWFGMNDLATSKASIKEQLPVLKRGHLWIMSLLYLATFGSFIGFSAGFAMLSKTQFPDVQILQYAFFGPFIGALARSAGGALSDRLGGTRVTLVNFILMAIFSGLLFLTLPTDGQGGSFMAFFAVFLALFLTAGLGSGSTFQMISVIFRKLTMDRVKAEGGSDERAMREAATDTAAALGFISAIGAIGGFFIPKAFGSSLALTGSPVGAMKVFLIFYIACVVITWAVYGRHSKK

SEQ ID NO: 10145 - protein, 1247 aa, Escherichia coli
MSKFLDRFRYFKQKGETFADGHGQLLNTNRDWEDGYRQRWQHDKIVRSTHGVNCTGSCSWKIYVKNGLVTWETQQTDYPRTRPDLPNHEPRGCPRGASYSWYLYSANRLKYPMMRKRLMKMWREAKALHSDPVEAWASIIEDADKAKSFKQARGRGGFVRSSWQEVNELIAASNVYTIKNYGPDRVAGFSPIPAMSMVSYASGARYLSLIGGTCLSFYDWYCDLPPASPQTWGEQTDVPESADWYNSSYIIAWGSNVPQTRTPDAHFFTEVRYKGTKTVAVTPDYAEIAKLCDLWLAPKQGTDAAMALAMGHVMLREFHLDNPSQYFTDYVRRYTDMPMLVMLEERDGYYAAGRMLRAADLVDALGQENNPEWKTVAFNTNGEMVAPNGSIGFRWGEKGKWNLEQRDGKTGEETELQLSLLGSQDEIAEVGFPYFGGDGTEHFNKVELENVLLHKLPVKRLQLADGSTALVTTVYDLTLANYGLERGLNDVNCATSYDDVKAYTPAWAEQITGVSRSQIIRIAREFADNADKTHGRSMIIVGAGLNHWYHLDMNYRGLINMLIFCGCVGQSGGGWAHYVGQEKLRPQTGWQPLAFALDWQRPARHMNSTSYFYNHSSQWRYETVTAEELLSPMADKSRYTGHLIDFNVRAERMGWLPSAPQLGTNPLTIAGEAEKAGMNPVDYTVKSLKEGSIRFAAEQPENGKNHPRNLFIWRSNLLGSSGKGHEFMLKYLLGTEHGIQGKDLGQQGGVKPEEVDWQDNGLEGKLDLVVTLDFRLSSTCLYSDIILPTATWYEKDDMNTSDMHPFIHPLSAAVDPAWEAKSDWEIYKAIAKKFSEVCVGHLGKETDIVTLPIQHDSAAELAQPLDVKDWKKGECDLIPGKTAPHIMVVERDYPATYERFTSIGPLMEKIGNGGKGIAWNTQSEMDLLRKLNYTKAEGPAKGQPMLNTAIDAAEMILTLAPETNGQVAVKAWAALSEFTGRDHTHLALNKEDEKIRFRDIQAQPRKIISSPTWSGLEDEHVSYNAGYTNVHELIPWRTLSGRQQLYQDHQWMRDFGESLLVYRPPIDTRSVKEVIGQKSNGNQEKALNFLTPHQKWGIHSTYSDNLLMLTLGRGGPVVWLSEADAKDLGIADNDWIEVFNSNGALTARAVVSQRVPAGMTMMYHAQERIVNLPGSEITQQRGGIHNSVTRITPKPTHMIGGYAHLAYGFNYYGTVGSNRDEFVVVRKMKNIDWLDGEGNDQVQESVK

SEQ ID NO: 10146 - protein, 205 aa, Escherichia coli
MAQLYFYYSAMNAGKSTALLQSSYNYQERGMRTVVYTAEIDDRFGAGKVSSRIGLSSPAKLFNQNSSLFDEIRAEHEQQAIHCVLVDECQFLTRQQVYELSEVVDQLDIPVLCYGLRTDFRGELFIGSQYLLAWSDKLVELKTICFCGRKASMVLRLDQAGRPYNEGEQVVIGGNERYVSVCRKHYKEALQVDSLTAIQERHRHD

SEQ ID NO: 10147 - protein, 891 aa, Escherichia coli
MAVTNVAELNALVERVKKAQREYASFTQEQVDKIFRAAALAAADARIPLAKMAVAESGMGIVEDKVIKNHFASEYIYNAYKDEKTCGVLSEDDTFGTITIAEPIGIICGIVPTTNPTSTAIFKSLISLKTRNAIIFSPHPRAKDATNKAADIVLQAAIAAGAPKDLIGWIDQPSVELSNALMHHPDINLILATGGPGMVKAAYSSGKPAIGVGAGNTPVVIDETADIKRAVASVLMSKTFDNGVICASEQSVVVVDSVYDAVRERFATHGGYLLQGKELKAVQDVILKNGALNAAIVGQPAYKIAELAGFSVPENTKILIGEVTVVDESEPFAHEKLSPTLAMYRAKDFEDAVEKAEKLVAMGGIGHTSCLYTDQDNQPARVSYFGQKMKTARILINTPASQGGIGDLYNFKLAPSLTLGCGSWGGNSISENVGPKHLINKKTVAKRAENMLWHKLPKSIYFRRGSLPIALDEVITDGHKRALIVTDRFLFNNGYADQITSVLKAAGVETEVFFEVEADPTLSIVRKGAELANSFKPDVIIALGGGSPMDAAKIMWVMYEHPETHFEELALRFMDIRKRIYKFPKMGVKAKMIAVTTTSGTGSEVTPFAVVTDDATGQKYPLADYALTPDMAIVDANLVMDMPKSLCAFGGLDAVTHAMEAYVSVLASEFSDGQALQALKLLKEYLPASYHEGSKNPVARERVHSAATIAGIAFANAFLGVCHSMAHKLGSQFHIPHGLANALLICNVIRYNANDNPTKQTAFSQYDRPQARRRYAEIADHLGLSAPGDRTAAKIEKLLAWLETLKAELGIPKSIREAGVQEADFLANVDKLSEDAFDDQCTGANPRYPLISELKQILLDTYYGRDYVEGETAAKKEAAPAKAEKKAKKSA

SEQ ID NO: 10148 - protein, 337 aa, Escherichia coli
MNVIETATVPLAQQQADALLNVKDLRVTFSTPDGDVTAVNDLNFSLRAGETLGIVGESGSGKSQTAFALMGLLAANGRIGGSATFNGREILNLPEHELNKLRAEQISMIFQDPMTSLNPYMRVGEQLMEVLMLHKNMSKAEAFEESVRMLDAVKMPEARKRMKMYPHEFSGGMRQRVMIAMALLCRPKLLIADEPTTALDVTVQAQIMTLLNELKREFNTAIIMITHDLVVVAGICDKVLVMYAGRTMEYGNARDVFYQPVHPYSIGLLNAVPRLDAEGETMLTIPGNPPNLLRLPKGCPFQPRCPHAMEICSSAPPLEEFTPGRLRACFKPVEELL

SEQ ID NO: 10149 - protein, 212 aa, Escherichia coli
MKKLTVAALAVTTLLSGSAFAHEAGEFFMRAGSATVRPTEGAGGTLGSLGGFSVTNNTQLGLTFTYMATDNIGVELLAATPFRHKIGTRATGDIATVHHLPPTLMAQWYFGDASSKFRPYVGAGINYTTFFDNGFNDHGKEAGLSDLSLKDSWGAAGQVGVDYLINRDWLVNMSVWYMDIDTTANYKLGGAQQHDSVRLDPWVFMFSAGYRF

SEQ ID NO: 10150 - protein, 531 aa, Escherichia coli
MADILLLDNIDSFTYNLADQLRSNGHNVVIYRNHIPAQTLIERLATMSNPVLMLSPGPGVPSEAGCMPELLTRLRGKLPIIGICLGHQAIVEAYGGYVGQAGEILHGKASSIEHDGQAMFAGLTNPLPVARYHSLVGSNIPAGLTINAHFNGMVMAVRHDADRVCGFQFHPESILTTQGARLLEQTLAWAQQKLEPANTLQPILEKLYQAQTLSQQESHQLFSAVVRGELKPEQLAAALVSMKIRGEHPNEIAGAATALLENAAPFPRPDYLFADIVGTGGDGSNSINISTASAFVAAACGLKVAKHGNRSVSSKSGSSDLLAAFGINLDMNADKSRQALDELGVCFLFAPKYHTGFRHAMPVRQQLKTRTLFNVLGPLINPAHPPLALIGVYSPELVLPIAETLRVLGYQRAAVVHSGGMDEVSLHAPTIVAELHDGEIKSYQLTAEDFGLTPYHQEQLAGGTPEENRDILTRLLQGKGDAAHEAAVAANVAMLMRLHGHEDLQANAQTVLEVLRSGSAYDRVTALAARG

SEQ ID NO: 10151 - protein, 865 aa, Escherichia coli
MGKALVIVESPAKAKTINKYLGSDYVVKSSVGHIRDLPTSGSAAKKSADSTSTKTAKKPKKDERGALVNRMGVDPWHNWEAHYEVLPGKEKVVSELKQLAEKADHIYLATDLDREGEAIAWHLREVIGGDDARYSRVVFNEITKNAIRQAFNKPGELNIDRVNAQQARRFMDRVVGYMVSPLLWKKIARGLSAGRVQSVAVRLVVEREREIKAFVPEEFWEVDASTTTPSGEALALQVTHQNDKPFRPVNKEQTQAAVSLLEKARYSVLEREDKPTTSKPGAPFITSTLQQAASTRLGFGVKKTMMMAQRLYEAGYITYMRTDSTNLSQDAVNMVRGYISDNFGKKYLPESPNQYASKENSQEAHEAIRPSDVNVMAESLKDMEADAQKLYQLIWRQFVACQMTPAKYDSTTLTVGAGDFRLKARGRILRFDGWTKVMPALRKGDEDRILPAVNKGDALTLVELTPAQHFTKPPARFSEASLVKELEKRGIGRPSTYASIISTIQDRGYVRVENRRFYAEKMGEIVTDRLEENFRELMNYDFTAQMENSLDQVANHEAEWKAVLDHFFSDFTQQLDKAEKDPEEGGMRPNQMVLTSIDCPTCGRKMGIRTASTGVFLGCSGYALPPKERCKTTINLVPENEVLNVLEGEDAETNALRAKRRCPKCGTAMDSYLIDPKRKLHVCGNNPTCDGYEIEEGEFRIKGYDGPIVECEKCGSEMHLKMGRFGKYMACTNEECKNTRKILRNGEVAPPKEDPVPLPELPCEKSDAYFVLRDGAAGVFLAANTFPKSRETRAPLVEELYRFRDRLPEKLRYLADAPQQDPEGNKTMVRFSRKTKQQYVSSEKDGKATGWSAFYVDGKWVEGKK

SEQ ID NO: 10152 - protein, 262 aa, Escherichia coli
MGFLSGKRILVTGVASKLSIAYGIAQAMHREGAELAFTYQNDKLKGRVEEFAAQLGSDIVLQCDVAEDASIDTMFAELGKVWPKFDGFVHSIGFAPGDQLDGDYVNAVTREGFKIAHDISSYSFVAMAKACRSMLNPGSALLTLSYLGAERAIPNYNVMGLAKASLEANVRYMANAMGPEGVRVNAISAGPIRTLAASGIKDFRKMLAHCEAVTPIRRTVTIEDVGNSAAFLCSDLSAGISGEVVHVDGGFSIAAMNELELK

SEQ ID NO: 10153 - protein, 426 aa, Escherichia coli
MTEHTSSYYAASANKYAPFDTLNESITCDVCVVGGGYTGLSSALHLAEAGFDVVVLEASRIGFGASGRNGGQLVNSYSRDIDVIEKSYGMDTARMLGSMMFEGGEIIRERIKRYQIDCDYRPGGLFVAMNDKQLATLEEQKENWERYGNKQLELLDANAIRREVASDRYTGALLDHSGGHIHPLNLAIGEADAIRLNGGRVYELSAVTQIQHTTPAVVRTAKGQVTAKYVIVAGNAYLGDKVEPELAKRSMPCGTQVITTERLSEDLARSLIPKNYCVEDCNYLLDYYRLTADNRLLYGGGVVYGARDPDDVERLVVPKLLKTFPQLKGVKIDYRWTGNFLLTLSRMPQFGRLDTNIYYMQGYSGHGVTCTHLAGRLIAELLRGDAERFDAFANLPHYPFPGGRTLRVPFTAMGAAYYSLRDRLGV

SEQ ID NO: 10154 - protein, 351 aa, Escherichia coli
MKSAMTSSPLRVAIIGAGQVADKVHASYYCTRNDLELVAVCDSRLSQAQALAEKYGNASVWDDPQAMLLAVKPDVVSVCSPNRFHYEHTLMALEAGCHVMCEKPPAMTPEQAREMCDTARKLGKVLAYDFHHRFALDTQQLREQVTNGVLGEIYVTTARALRRCGVPGWGVFTNKELQGGGPLIDIGIHMLDAAMYVLGFPAVKSVNAHSFQKIGTQKSCGQFGEWDPATYSVEDSLFGTIEFHNGGILWLETSFALNIREQSIMNVSFCGDKAGATLFPAHIYTDNNGELMTLMQREIADDNRHLRSMEAFINHVQGKPVMIADAEQGYIIQQLVAALYQSAETGTRVEL

SEQ ID NO: 10155 - protein, 755 aa, Escherichia coli
MTRPVTLSEPHFSQHTLNKYASLMAQGNGYLGLRASHEEDYTRQTRGMYLAGLYHRAGKGEINELVNLPDVVGMEIAINGEVFSLSHEAWQRELDFASGELRRNVVWRTSNGSGYTIASRRFVSADQLPLIALEITITPLDADASVLISTGIDATQTNHGRQHLDETQVRVFGQHLMQGSYTTQDGRSDVAISCCCKVSGDVQQCYTAKERRLLQHTSAQLHAGETMTLQKLVWIDWRDDRQAALDEWGSASLRQLEMCAQQSYDQLLAASTENWRQWWQKRRITVNGGEAHDQQALDYALYHLRIMTPAHDERSSIAAKGLTGEGYKGHVFWDTEVFLLPFHLFSDPTVARSLLRYRWHNLPGAQEKARRNGWQGALFPWESARSGEEETPEFAAINIRTGLRQKVASAQAEHHLVADIAWAVIQYWQTTGDESFIAHEGMALLLETAKFWISRAVRVNDRLEIHDVIGPDEYTEHVNNNAYTSYMARYNVQQALNIARQFGCSDDAFIHRAEMFLKELWMPEIQPDGVLPQDDSFMAKPAINLAKYKAAAGKQTILLDYSRAEVNEMQILKQADVVMLNYMLPEQFSAASCLANLQFYEPRTIHDSSLSKAIHGIVAARCGLLTQSYQFWREGTEIDLGADPHSCDDGIHAAATGAIWLGAIQGFAGVSVRDGELHLNPALPEQWQQLSFPLFWQGCELQVTLDAQRIAIRTSAPVSLRLNGQLITVAEESVFCLGDFILPFNGTATKHQEDE

SEQ ID NO: 10156 - protein, 332 aa, Escherichia coli
MSPTIYDIARVAGVSKSTVSRVLNKQTNISPEAREKVLRAIEELQYQPNKLARALTSSGFDAIMVISTRSTKTTAGNPFFSEVLHAITAKAEEEGFDVILQTSHNPAEDLQKCESKIKQKMIKGIIMLSSPADESFFAQLDKYDIPVVVIGKVEGQYAHVYSVDTDNFGDSIALTDALIESGHQNIACLHAPLDVHVSVDRVNGYKQSLAAHNIAVRDEWIVDGGYTHETALKAARQLLSQSPLPEAVFATDSLKLMSIYRAAAEKNIAIPQQLAVVGYSNETLSFILTPAPGGIDVPTQELGQQSCELLFRLISGKPSPQNITVATHMTLK

SEQ ID NO: 10157 - protein, 510 aa, Escherichia coli
MPMSMSSIPSSSQSGKLYGWVERIGNKVPHPFLLFIYLIIVLMVTTAILSAFGVSAKNPTDGTPVVVKNLLSVEGLHWFLPNVIKNFSGFAPLGAILALVLGAGLAERVGLLPALMVKMASHVNARYASYMVLFIAFFSHISSDAALVIMPPMGALIFLAVGRHPVAGLLAAIAGVGCGFTANLLIVTTDVLLSGISTEAAAAFNPQMHVSVIDNWYFMASSVVVLTIVGGLITDKIIEPRLGQWQGNSDEKLQTLTESQRFGLRIAGVVSLLFIAAIALMVIPQNGILRDPINHTVMPSPFIKGIVPLIILFFFVVSLAYGIATRTIRRQADLPHLMIEPMKEMAGFIVMVFPLAQFVAMFNWSNMGKFIAVGLTDILESSGLSGIPAFVGLALLSSFLCMFIASGSAIWSILAPIFVPMFMLLGFHPAFAQILFRIADSSVLPLAPVSPFVPLFLGFLQRYKPDAKLGTYYSLVLPYPLIFLVVWLLMLLAWYLVGLPIGPGIYPRLS

SEQ ID NO: 10158 - protein, 481 aa, Escherichia coli
MQEIYRFIDDAIEADRQRYTDIADQIWDHPETRFEEFWSAEHLASALESAGFTVTRNVGNIPNAFIASFGQGKPVIALLGEYDALAGLSQQAGCAQPTSVTPGENGHGCGHNLLGTAAFAAAIAVKKWLEQYGQGGTVRFYGCPGEEGGSGKTFMVREGVFDDVDAALTWHPEAFAGMFNTRTLANIQASWRFKGIAAHAANSPHLGRSALDAVTLMTTGTNFLNEHIIEKARVHYAITNSGGISPNVVQAQAEVLYLIRAPEMTDVQHIYDRVAKIAEGAALMTETTVECRFDKACSSYLPNRTLENAMYQALSHFGTPEWNSEELAFAKQIQATLTSNDRQNSLNNIAATGGENGKVFALRHRETVLANEVAPYAATDNVLAASTDVGDVSWKLPVAQCFSPCFAVGTPLHTWQLVSQGRTSIAHKGMLLAAKTMAATTVNLFLDSGLLQECQQEHQQVTDTQPYHCPIPKNVTPSPLK

SEQ ID NO: 10159 - protein, 301 aa, Escherichia coli
MNPAVDNEFQQWLSQINQVCGNFTGRLLTERYTGVLDTHFAKGLKLSTVTTSGVNLSRTWQEVKGSDDAWFYTVFQLSGQAIMEQDERQVQIGAGDITLLDASRPCSLYWQESSKQISLLLPRTLLEQYFPHQKPICAERLDADLPMVQLSHRLLQESMNNPALSETESEAALQAMVCLLRPVLHQRESVQPRRERQFQKVVTLIDDNIREEILRPEWIAGETGMSVRSLYRMFADKGLVVAQYIRNRRLDFCADAIRHAADDEKLAGIGFHWGFSDQSHFSTVFKQRFGMTPGEYRRKFR

SEQ ID NO: 10160 - protein, 376 aa, Escherichia coli
MLQRGCDGCKQNQSREPATIDGFMPKAQESIMGQQKQRNRRWVLASRPHGAPVPENFRLEEDDVATPGEGQVLLRTVYLSLDPYMRGRMSDEPSYSPPVDIGGVMVGGTVSRVVESNHPDYQSGDWVLGYSGWQDYDISSGDDLVKLGDHPQNPSWSLGVLGMPGFTAYMGLLDIGQPKEGETLVVAAATGPVGATVGQIGKLKGCRVVGVAGGAEKCRHATEVLGFDVCLDHHADDFAEQLAKACPKGIDIYYENVGGKVFDAVLPLLNTSARIPVCGLVSSYNATELPPGPDRLPLLMATVLKKRIRLQGFIIAQDYGHRIHEFQREMGQWVKEDKIHYREEITDGLENAPQTFIGLLKGKNFGKVVIRVAGDD

SEQ ID NO: 10161 - protein, 462 aa, Escherichia coli
MALQNEKNSRYLLRDWKPENPAFWENKGKHIARRNLWISVSCLLLAFCVWMLFSAVTVNLNKIGFNFTTDQLFLLTALPSVSGALLRVPYSFMVPIFGGRRWTVFSTAILIIPCVWLGIAVQNPNTPFGIFIVIALLCGFAGANFASSMGNISFFFPKAKQGSALGINGGLGNLGVSVMQLVAPLVIFVPVFAFLGVNGVPQADGSVMSLANAAWIWVPLLAIATIAAWSGMNDIASSRASIADQLPVLQRLHLWLLSLLYLATFGSFIGFSAGFAMLAKTQFPDVNILRLAFFGPFIGAIARSVGGAISDKFGGVRVTLINFIFMAIFSALLFLTLPGTGSGNFIAFYAVFMGLFLTAGLGSGSTFQMIAVIFRQITIYRVKMKGGSDEQAHKEAVTETAAALGFISAIGAVGGFFIPQAFGMSLNMTGSPVGAMKVFLIFYIVCVLLTWLVYGRRKFSQK

SEQ ID NO: 10162 - protein, 346 aa, Escherichia coli
MQNIIRKGGTMKAAVVTKDHHVDVTYKTLRSLKHGEALLKMECCGVCHTDLHVKNGDFGDKTGVILGHEGIGVVAEVGPGVTSLKPGDRASVAWFYEGCGHCEYCNSGNETLCRSVKNAGYSVDGGMAEECIVVADYAVKVPDGLDSAAASSITCAGVTTYKAVKLSKIRPGQWIAIYGLGGLGNLALQYAKNVFNAKVIAIDVNDEQLKLATEMGADLAINSHTEDAAKIVQEKTGGAHAAVVTAVAKAAFNSAVDAVRAGGRVVAVGLPPESMSLDIPRLVLDGIEVVGSLVGTRQDLTEAFQFAAEGKVVPKVALRPLADINTIFTEMEEGKIRGRMVIDFRH

SEQ ID NO: 10163 - protein, 317 aa, Escherichia coli
MTINDSAISEQGMCEEEQVARIAWFYYHDGLTQSEISDRLGLTRLKVSRLLEKGHQSGIIRVQINSRFEGCLEYETQLRRQFSLQHVRVIPGLADADVGGRLGIGAAHMLMSLLQPQQMLAIGFGEATMNTLQRLSGFISSQQIRLVTLSGGVGSYMTGIGQLNAACSVNIIPAPLRASSADIARTLKNENCVKDVLLAAQAADVAIVGIGAVSQQDDATIIRSGYISQGEQLMIGRKGAVGDILGYFFDAKGDVVTNIKIHNELIGLPLSALKTIPVRVGVAGGENKAEAIAAAMKGGYINALVTDQDTAAAILRS

SEQ ID NO: 10164 - protein, 396 aa, Escherichia coli
MTTNTVSRKVAWLRVVTLAVAAFIFNTTEFVPVGLLSDIAQSFHMQTAQVGIMLTIYAWVVALMSLPFMLMTSQVERRKLLICLFVVFIASHVLSFLSWSFTVLVISRIGVAFAHAIFWSITASLAIRMAPAGKRAQALSLIATGTALAMVLGLPLGRIVGQYFGWRMTFFAIGIGALITLLCLIKLLPLLPSEHSGSLKSLPLLFRRPALMSIYLLTVVVVTAHYTAYSYIEPFVQNIAGFSANFATALLLLLGGAGIIGSVIFGKLGNQYASALVSTAIALLLVCLALLLPAANSEIHLGVLSIFWGIAMMIIGLGMQVKVLALAPDATDVAMALFSGIFNIGIGAGALVGNQVSLHWSMSMIGYVGAVPAFAALIWSIIIFRRWPVTLEEQTQ

SEQ ID NO: 10165 - protein, 417 aa, Escherichia coli
MSRTTTVDGAPASDTDKQSISQPNQFIKRGTPQFMRVTLALFSAGLATFALLYCVQPILPVLSQEFGLTPANSSISLSISTAMLAIGLLFTGPLSDAIGRKPVMVTALLLASICTLLSTMMTSWHGILIMRALIGLSLSGVAAVGMTYLSEEIHPSFVAFSMGLYISGNSIGGMSGRLISGVFTDFFNWRIALAAIGCFALASALMFWKILPESRHFRPTSLRPKTLFINFRLHWRDRGLPLLFAEGFLLMGSFVTLFNYIGYRLMLSPWHVSQAVVGLLSLAYLTGTWSSPKAGTMTTRYGRGPVMLFSTGVMLFGLLMTLFSSLWLIFAGMLLFSAGFFAAHSVASSWIGPRAKRAKGQASSLYLFSYYLGSSIAGTLGGVFWHNYGWNGVGAFIALMLVIALLVGTRLHRRLHA

SEQ ID NO: 10166 - protein, 510 aa, Escherichia coli
MRIGIPRERLTNETRVAATPKTVEQLLKLGFTVAVESGAGQLASFDDKAFVQAGAEIVEGNSVWQSEIILKVNAPLDDEIALLNPGTTLVSFIWPAQNPELMQKLAERNVTVMAMDSVPRISRAQSLDALSSMANIAGYRAIVEAAHEFGRFFTGQITAAGKVPPAKVMVIGAGVAGLAAIGAANSLGAIVRAFDTRPEVKEQVQSMGAEFLELDFKEEAGSGDGYAKVMSDAFIKAEMELFAAQAKEVDIIVTTALIPGKPAPKLITREMVDSMKAGSVIVDLAAQNGGNCEYTVPGEIFTTENGVKVIGYTDLPGRLPTQSSQLYGTNLVNLLKLLCKEKDGNITVDFDDVVIRGVTVIRAGEITWPAPPIQVSAQPQAAQKAAPEVKTEEKCTCSPWRKYALMALAIILFGWMASVAPKEFLGHFTVFALACVVGYYVVWNVSHALHTPLMSVTNAISGIIVVGALLQIGQGGWVSFLSFIAVLIASINIFGGFTVTQRMLKMFRKN

SEQ ID NO: 10167 - protein, 424 aa, Escherichia coli
MASSNLIKQLQERGLVAQVTDEEALAERLAQGPIALYCGFDPTADSLHLGHLVPLLCLKRFQQAGHKPVALVGGATGLIGDPSFKAAERKLNTEETVQEWVDKIRKQVAPFLDFDCGENSAIAANNYDWFGNMNVLTFLRDIGKHFSVNQMINKEAVKQRLNREDQGISFTEFSYNLLQGYDFACLNKQYGVVLQIGGSDQWGNITSGIDLTRRLHQNQVFGLTVPLITKADGTKFGKTEGGAVWLDPKKTSPYKFYQFWINTADADVYRFLKFFTFMSIEEINALEEEDKNSGKAPRAQYVLAEQVTRLVHGEEGLQAAKRITECLFSGSLSALSEADFEQLAQDGVPMVEMEKGADLMQALVDSELQPSRGQARKTIASNAITINGEKQSDPEYFFKEEDRLFGRFTLLRRGKKNYCLICWK

SEQ ID NO: 10168 - protein, 299 aa, Escherichia coli
MRLPCSGNTDCVVTMSIKTIKYFSTIIVAVVAVLAGWWLWNYYMQSPWTRDGKIRAEQVSITPQVSGRIVELNIKDNQLVNAGDLLLTIDKTPFQIAELNAQAQLAKAQSDLAKANNEANRRRHLSQNFISAEELDTANLNVKAMQASVDAAQATLKQAQWQLAQTEIRAPVSGWVTNLTTRIGDYADTGKPLFALVDSHSFYVIGYFEETKLRHIREGAPAQITLYSDNKTLQGHVSSIGRAIYDQSVESDSSLIPDVKPNVPWVRLAQRVPVRFALDKVPGDVTLVSGTTCSIAVGQ

SEQ ID NO: 10169 - protein, 199 aa, Escherichia coli
MNKHTEHDTREHLLATGEQLCLQRGFTGMGLSELLKTAEVPKGSFYHYFRSKEAFGVAMLERHYAAYHQRLTELLQSGEGNYRDRILAYYQQTLNQFCQHGTISGCLTVKLSAEVCDLSEDMRSAMDKGARGVIALLSQALENGRENHCLTFCGEPLQQAQVLYALWLGANLQAKISRSFEPLENALAHVKNIIATPAV

SEQ ID NO: 10170 - protein, 213 aa, Escherichia coli
MFTGIVQGTAKLVSIDEKPNFRTHVVELPDHMLDGLETGASVAHNGCCLTVTEINGNHVSFDLMKETLRITNLGDLKVGDWVNVERAAKFSDEIGGHLMSGHIMTTAEVAKILTSENNRQIWFKVQDSQLMKYILYKGFIGIDGISLTVGEVTPTRFCVHLIPETLERTTLGKKKLGARVNIEIDPQTQAVVDTVERVLAARENAMNQPGTEA

SEQ ID NO: 10171 - protein, 470 aa, Escherichia coli
MKKTKIVCTIGPKTESEEMLAKMLDAGMNVMRLNFSHGDYAEHGQRIQNLRNVMSKTGKTAAILLDTKGPEIRTMKLEGGNDVSLKAGQTFTFTTDKSVIGNSEMVAVTYEGFTTDLSVGNTVLVDDGLIGMEVTAIEGNKVICKVLNNGDLGENKGVNLPGVSIALPALAEKDKQDLIFGCEQGVDFVAASFIRKRSDVIEIREHLKAHGGENIHIISKIENQEGLNNFDEILEASDGIMVARGDLGVEIPVEEVIFAQKMMIEKCIRARKVVITATQMLDSMIKNPRPTRAEAGDVANAILDGTDAVMLSGESAKGKYPLEAVSIMATICERTDRVMNSRLEFNNDNRKLRITEAVCRGAVETAEKLDAPLIVVATQGGKSARAVRKYFPDATILALTTNEKTAHQLVLSKGVVPQLVKEITSTDDFYRLGKELALQSGLAHKGDVVVMVSGALVPSGTTNTASVHVL

SEQ ID NO: 10172 - protein, 248 aa, Escherichia coli
MLSIKDLHVSVEDKAILRGLSLDVHPGEVHAIMGPNGSGKSTLSATLAGREDYEVTGGTVEFKGKDLLALSPEDRAGEGIFMAFQYPVEIPGVSNQFFLQTALNAVRSYRGQETLDRFDFQDLMEEKIALLKMPEDLLTRSVNVGFSGGEKKRNDILQMAVLEPELCILDESDSGLDIDALKVVADGVNSLRDGKRSFIIVTHYQRILDYIKPDYVHVLYQGRIVKSGDFTLVKQLEEQGYGWLTEQQ

SEQ ID NO: 10173 - protein, 252 aa, Escherichia coli
MKTVTVKDLVIGTGAPKIIVSLMAKDIASVKSEALAYREADFDILEWRVDHYADLSNVESVMAAAKILRETMPEKPLLFTFRSAKEGGEQAISTEAYIALNRAAIDSGLVDMIDLELFTGDDQVKETVAYAHAHDVKVVMSNHDFHKTPEAEEIIARLRKMQSFDADIPKIALMPQSTSDVLTLLAATLEMQEQYADRPIITMSMAKTGVISRLAGEVFGSAATFGAVKKASAPGQISVNDLRTVLTILHQA

SEQ ID NO: 10174 - protein, 795 aa, Escherichia coli
MKFSELWLREWVNPAIDSDALANQITMAGLEVDGVEPVAGSFHGVVVGEVVECAQHPNADKLRVTKVNVGGDRLLDIVCGAPNCRQGLRVAVATIGAVLPGDFKIKAAKLRGEPSEGMLCSFSELGISDDHSGIIELPADAPIGTDIREYLKLDDNTIEISVTPNRADCLGIIGVARDVAVLNQLPLVQPEIVPVGATIDDTLPITVEAPEACPRYLGRVVKGINVKAPTPLWMKEKLRRCGIRSIDAVVDVTNYVLLELGQPMHAFDKDRIEGGIVVRMAKEGETLVLLDGTEAKLNADTLVIADHNKALAMGGIFGGEHSGVNDETQNVLLECAFFSPLSITGRARRHGLHTDASHRYERGVDPALQHKAMERATRLLIDICGGEAGPVIDITNEATLPKRATITLRRSKLDRLIGHHIADEQVTDILRRLGCEVTEGKDEWQAVAPSWRFDMEIEEDLVEEVARVYGYNNIPDEPVQASLIMGTHREADLSLKRVKTLLNDKGYQEVITYSFVDPKVQQMIHPGVEALLLPSPISVEMSAMRLSLWTGLLATVVYNQNRQQNRVRIFESGLRFVPDTQAPLGIRQDLMLAGVICGNRYEEHWNLAKETVDFYDLKGDLESVLDLTGKLNEVEFRAEANPALHPGQSAAIYLKGERIGFVGVVHPELERKLDLNGRTLVFELEWNKLADRVVPQAREISRFPANRRDIAVVVAENVPAADILSECKKVGVNQVVGVNLFDVYRGKGVAEGYKSLAISLILQDTSRTLEEEEIAATVAKCVEALKERFQASLRD

SEQ ID NO: 10175 - protein, 327 aa, Escherichia coli
MSHLAELVASAKAAISQASDVAALDNVRVEYLGKKGHLTLQMTTLRELPPEERPAAGAVINEAKEQVQQALNARKAELESAALNARLAAETIDVSLPGRRIENGGLHPVTRTIDRIESFFGELGFTVATGPEIEDDYHNFDALNIPGHHPARADHDTFWFDTTRLLRTQTSGVQIRTMKAQQPPIRIIAPGRVYRNDYDQTHTPMFHQMEGLIVDTNISFTNLKGTLHDFLRNFFEEDLQIRFRPSYFPFTEPSAEVDVMGKNGKWLEVLGCGMVHPNVLRNVGIDPEVYSGFAFGMGMERLTMLRYGVTDLRSFFENDLRFLKQFK

SEQ ID NO: 10176 - protein, 118 aa, Escherichia coli [sequence omitted]

SEQ ID NO: 10177 - protein, 65 aa, Escherichia coli [sequence omitted]

SEQ ID NO: 10178 - protein, 180 aa, Escherichia coli
MKGGKRVQTARPNRINGEIRAQEVRLTGLEGEQLGIVSLREALEKAEEAGVDLVEISPNAEPPVCRIMDYGKFLYEKSKSSKEQKKKQKVIQVKEIKFRPGTDEGDYQVKLRSLIRFLEEGDKAKITLRFRGREMAHQQIGMEVLNRVKDDLQELAVVESFPTKIEGRQMIMVLAPKKKQ

SEQ ID NO: 10179 - protein, 642 aa, Escherichia coli
MPVITLPDGSQRHYDHAVSPMDVALDIGPGLAKACIAGRVNGELVDACDLIENDAQLSIITAKDEEGLEIIRHSCAHLLGHAIKQLWPHTKMAIGPVIDNGFYYDVDLDRTLTQEDVEALEKRMHELAEKNYDVIKKKVSWHEARETFANRGESYKVSILDENIAHDDKPGLYFHEEYVDMCRGPHVPNMRFCHHFKLMKTAGAYWRGDSNNKMLQRIYGTAWADKKALNAYLQRLEEAAKRDHRKIGKQLDLYHMQEEAPGMVFWHNDGWTIFRELEVFVRSKLKEYQYQEVKGPFMMDRVLWEKTGHWDNYKDAMFTTSSENREYCIKPMNCPGHVQIFNQGLKSYRDLPLRMAEFGSCHRNEPSGSLHGLMRVRGFTQDDAHIFCTEEQIRDEVNGCIRLVYDMYSTFGFEKIVVKLSTRPEKRIGSDEMWDRAEADLAVALEENNIPFEYQLGEGAFYGPKIEFTLYDCLDRAWQCGTVQLDFSLPSRLSASYVGEDNERKVPVMIHRAILGSMERFIGILTEEFAGFFPTWLAPVQVVIMNITDSQSEYVNELTQKLSNAGIRVKADLRNEKIGFKIREHTLRRVPYMLVCGDKEVESGKVAVRTRRGKDLGSMDVNEVIEKLQQEIRSRSLKQLEE

SEQ ID NO: 10180 - protein, 309 aa, Escherichia coli
MVRIYTLTLAPSLDSATITPQIYPEGKLRCTAPVFEPGGGGINVARAIAHLGGSATAIFPAGGATGEHLVSLLADENVPVATVEAKDWTRQNLHVHVEASGEQYRFVMPGAALNEDEFRQLEEQVLEIESGAILVISGSLPPGVKLEKLTQLISAAQKQGIRCIVDSSGEALSAALAIGNIELVKPNQKELSALVNRELTQPDDVRKAAQEIVNSGKAKRVVVSLGPQGALGVDSENCIQVVPPPVKSQSTVGAGDSMVGAMTLKLAENASLEEMVRFGVAAGSAATLNQGTRLCSHDDTQKIYAYLSR

SEQ ID NO: 10181 - protein, 753 aa, Escherichia coli
MSQHNEKNPHQHQSPLHDSSEAKPGMDSLAPEDGSHRPAAEPTPPGAQPTAPGSLKAPDTRNEKLNSLEDVRKGSENYALTTNQGVRIADDQNSLRAGSRGPTLLEDFILREKITHFDHERIPERIVHARGSAAHGYFQPYKSLSDITKADFLSDPNKITPVFVRFSTVQGGAGSADTVRDIRGFATKFYTEEGIFDFVGNNTPIFFIQDAHKFPDFVHAVKPEPHWAIPQGQSAHDTFWDYVSLQPETLHNVMWAMSDRGIPRSYRTMEGFGIHTFRLINAEGKATFVRFHWKPLAGKASLVWDEAQKLTGRDPDFHRRELWEAIEAGDFPEYELGFQLIPEEDEFKFDFDLLDPTKLIPEELVPVQRVGKMVLNRNPDNFFAENEQAAFHPGHIVPGLDFTNDPLLQGRLFSYTDTQISRLGGPNFHEIPINRPTCPYHNFQRDGMHRMGIDTNPANYEPNSINDNWPRETPPGPKRGGFESYQERVEGNKVRERSPSFGEYYSHPRLFWLSQTPFEQRHIVDGFSFELSKVVRPYIRERVVDQLAHIDLTLAQAVAKNLGIELTDDQLNITPPPDVNGLKKDPSLSLYAIPDGDVKGRVVAILLNDEVRSADLLAILKALKAKGVHAKLLYSRMGEVTADDGTVLPIAATFAGAPSLTVDAVIVPCGNIADIADNGDANYYLMEAYKHLKPIALAGDARKFKATIKIADQGEEGIVEADSADGSFMDELLTLMAAHRVWSRIPKIDKIPA

SEQ ID NO: 10182 - protein, 116 aa, Escherichia coli
MMDLDNIPDTQTEAEELEEVVMGLIINSGQARSLAYAALKQAKQGDFAAAKAMMDQSRMALNEAHLVQTKLIEGDAGEGKMKVSLVLVHAQDHLMTSMLARELITELIELHEKLKA

SEQ ID NO: 10183 - protein, 452 aa, Escherichia coli
MSNVIASLEKVLLPFAVKIGKQPHVNAIKNGFIRLMPLTLAGAMFVLINNVFLSFGEGSFFYSLGIRLDASTIETLNGLKGIGGNVYNGTLGIMSLMAPFFIGMALAEERKVDALAAGLLSVAAFMTVTPYSVGEAYAVGANWLGGANIISGIIIGLVVAEMFTFIVRRNWVIKLPDSVPASVSRSFSALIPGFIILSVMGIIAWALNTWGTNFHQIIMDTISTPLASLGSVVGWAYVIFVPLLWFFGIHGALALTALDNGIMTPWALENIATYQQYGSVEAALAAGKTFHIWAKPMLDSFIFLGGSGATLGLILAIFIASRRADYRQVAKLALPSGIFQINEPILFGLPIIMNPVMFIPFVLVQPILAAITLAAYYMGIIPPVTNIAPWTMPTGLGAFFNTNGSVAALLVALFNLGIATLIYLPFVVVANKAQNAIDKEESEEDIANALKF

SEQ ID NO: 10184 - protein, 275 aa, Escherichia coli
MTLQQQIIKALGAKPQINAEEEIRRSVDFLKSYLQTYPFIKSLVLGISGGQDSTLAGKLCQMAINELRLETGNESLQFIAVRLPYGVQADEQDCQDAIAFIQPDRVLTVNIKGAVLASEQALREAGIELSDFVRGNEKARERMKAQYSIAGMTSGVVVGTDHAAEAITGFFTKYGDGGTDINPLYRLNKRQGKQLLAALACPEHLYKKAPTADLEDDRPSLPDEVALGVTYDNIDDYLEGKNVPQQVARTIENWYLKTEHKRRPPITVFDDFWKK

SEQ ID NO: 10185 - protein, 653 aa, Escherichia coli
MRLFIAEKPSLARAIADVLPKPHRKGDGFIECGNGQVVTWCIGHLLEQAQPDAYDSRYARWNLADLPIVPEKWQLQPRPSVTKQLNVIKRFLHEASEIVHAGDPDREGQLLVDEVLDYLQLAPEKRQQVQRCLINDLNPQAVERAIDRLRSNSEFVPLCVSALARARADWLYGINMTRAYTILGRNAGYQGVLSVGRVQTPVLGLVVRRDEEIENFVAKDFFEVKAHIVTPADERFTAIWQPSEACEPYQDEEGRLLHRPLAEHVVNRISGQPAIVTSYNDKRESESAPLPFSLSALQIEAAKRFGLSAQNVLDICQKLYETHKLITYPRSDCRYLPEEHFAGRHAVMNAISVHAPDLLPQPVVDPDIRNRCWDDKKVDAHHAIIPTARSSAINLTENEAKVYNLIARQYLMQFCPDAVFRKCVIELDIAKGKFVAKARFLAEAGWRTLLGSKERDEENDGTPLPVVAKGDELLCEKGEVVERQTQPPRHFTDATLLSAMTGIARFVQDKDLKKILRATDGLGTEATRAGIIELLFKRGFLTKKGRYIHSTDAGKALFHSLPEMATRPDMTAHWESVLTQISEKQCRYQDFMQPLVGTLYQLIDQAKRTPVRQFRGIVAPGSGGSADKKKAAPRKRSAKKSPPADEVGSGAIA

SEQ ID NO: 10186 - protein, 326 aa, Escherichia coli
MKKIPLGTTDITLSRMGLGTWAIGGGPAWNGDLDRQICIDTILEAHRCGINLIDTAPGYNFGNSEVIVGQALKKLPREQVVVETKCGIVWERKGSLFNKVGDRQLYKNLSPESIREEVAASLQRLGIDYIDIYMTHWQSVPPFFTPIAETVAVLNELKSEGKIRAIGAANVDADHIREYLQYGELDIIQAKYSILDRAMENELLPLCRDNGIVVQVYSPLEQGLLTGTITRDYVPGGARANKVWFQRENMLKVIDMLEQWQPLCARYQCTIPTLALAWILKQSDLISILSGATAPEQVRENVAALNINLSDADATLMREMAEALER

SEQ ID NO: 10187 - protein, 358 aa, Escherichia coli
MKALARFGKAFGGYKMIDVPQPMCGPEDVVIEIKAAAICGADMKHYNVDSGSDEFNSIRGHEFAGCIAQVGEKVKDWKVGQRVVSDNSGHVCGVCPACEQGDFLCCTEKVNLGLDNNTWGGGFSKYCLVPGEILKIHRHALWEIPDGVDYEDAAVLDPICNAYKSIAQQSKFLPGQDVVVIGTGPLGLFSVQMARIMGAVNIVVVGLQEDVAVRFPVAKELGATAVVNGSTEDVVARCQQICGKDNLGLVIECSGANIALKQAIEMLRPNGEVVRVGMGFKPLDFSINDITAWNKSIIGHMAYDSTSWRNAIRLLASGAIKVKPMITHRIGLSQWREGFDAMVDKTAIKVIMTYDFDE

SEQ ID NO: 10188 - protein, 331 aa, Escherichia coli
MTIKVGINGFGRIGRIVFRAAQKRSDIEIVAINDLLDADYMAYMLKYDSTHGRFDGTVEVKDGHLIVNGKKIRVTAERDPANLKWDEVGVDVVAEATGLFLTDETARKHITAGAKKVVMTGPSKDNTPMFVKGANFDKYAGQDIVSNASCTTNCLAPLAKVINDNFGIIEGLMTTVHATTATQKTVDGPSHKDWRGGRGASQNIIPSSTGAAKAVGKVLPELNGKLTGMAFRVPTPNVSVVDLTVRLEKAATYEQIKAAVKAAAEGEMKGVLGYTEDDVVSTDFNGEVCTSVFDAKAGIALNDNFVKLVSWYDNETGYSNKVLDLIAHISK

SEQ ID NO: 10189 - protein, 273 aa, Escherichia coli
MMHRLNLNGYEPDRHHEAAVAFCIHAGTDELTSPVHQHRKGQLILALHGAITCTVENALWMVPPQYAVWIPGGVEHSNQVTANAELCFLFIEPSAVTMPTTCCTLKISPLCRELILTLANRTTTQRAEPMTRRLIQVLFDELPQQPQQQLHLPVSSHPKIRTMVEMMAKGPVEWGALGQWAGFFAMSERNLARLIVKETGLSFRQWRQQLQLIMALQGLVKGDTVQKVAHTLGYDSTTAFITMFKKGLGQTPGRYIARLTTVSPQSAKPDPRQ

SEQ ID NO: 10190 - protein, 491 aa, Escherichia coli
MAVTQTAQACDLVIFGAKGDLARRKLLPSLYQLEKAGQLNPDTRIIGVGRADWDKAAYTKVVREALETFMKETIDEGLWDTLSARLDFCNLDVNDTAAFSRLGAMLDQKNRITINYFAMPPSTFGAICKGLGEAKLNAKPARVVMEKPLGTSLATSQEINDQVGEYFEECQVYRIDHYLGKETVLNLLALRFANSLFVNNWDNRTIDHVEITVAEEVGIEGRWGYFDKAGQMRDMIQNHLLQILCMIAMSPPSDLSADSIRDEKVKVLKSLRRIDRSNVREKTVRGQYTAGFAQGKKVPGYLEEEGANKSSNTETFVAIRVDIDNWRWAGVPFYLRTGKRLPTKCSEVVVYFKTPELNLFKESWQDLPQNKLTIRLQPDEGVDIQVLNKVPGLDHKHNLQITKLDLSYSETFNQTHLADAYERLLLETMRGIQALFVRRDEVEEAWKWVDSITEAWAMDNDAPKPYQAGTWGPVASVAMITRDGRSWNEFE

SEQ ID NO: 10191 - protein, 590 aa, Escherichia coli
MRTEYCGQLRLSHVGQQVTLCGWVNRRRDLGSLIFIDMRDREGIVQVFFDPDRADALKLASELRNEFCIQVTGTVRARDEKNINRDMATGEIEVLASSLTIINRADVLPLDSNHVNTEEARLKYRYLDLRRPEMAQRLKTRAKITSLVRRFMDDHGFLDIETPMLTKATPEGARDYLVPSRVHKGKFYALPQSPQLFKQLLMMSGFDRYYQIVKCFRDEDLRADRQPEFTQIDVETSFMTAPQVREVMEALVRHLWLEVKGVDLGDFPVMTFAEAERRYGSDKPDLRNPMELTDVADLLKSVEFAVFAGPANDPKGRVAALRVPGGASLTRKQIDEYGNFVKIYGAKGLAYIKVNERAKGLEGINSPVAKFLNAEIIEDILDRTAAQDGDMIFFGADNKKIVADAMGALRLKVGKDLGLTDESKWAPLWVIDFPMFEDDGEGGLTAMHHPFTSPKDMTAAELKAAPENAVANAYDMVINGYEVGGGSVRIHNGDMQQTVFGILGINEEEQREKFGFLLDALKYGTPPHAGLAFGLDRLTMLLTGTDNIRDVIAFPKTTAAACLMTEAPSFANPTALAELSIQVVKKAENN

SEQ ID NO: 10192 - protein, 199 aa, Escherichia coli
MRHDFVFSGVIMLELNAKTTALVVIDLQEGILPFAGGPHTADEVVNRAGKLAAKFRASGQPVFLVRVGWSADYAEALKQPVDAPSPAKVLPENWWQHPAALGATDSDIEIIKRQWGAFYGTDLELQLRRRGIDTIVLCGISTNIGVESTARNAWELGFNLVIAEDACSAASAEQHNNSINHIYPRIARVRSVEEILNAL

SEQ ID NO: 10193 - protein, 577 aa, Escherichia coli
MNIQALLSEKVRQAMIAAGAPADCEPQVRQSAKVQFGDYQANGMMAVAKKLGMAPRQLAEQVLTHLDLNGIASKVEIAGPGFINIFLDPAFLAEHVQQALASDRLGVATPEKQTIVVDYSAPNVAKEMHVGHLRSTIIGDAAVRTLEFLGHKVIRANHVGDWGTQFGMLIAWLEKQQQENAGEMELADLEGFYRDAKKHYDEDEEFAERARNYVVKLQSGDEYFREMWRKLVDITMTQNQITYDRLNVTLTRDDVMGESLYNPMLPGIVADLKAKGLAVESEGATVVFLDEFKNKEGEPMGVIIQKKDGGYLYTTTDIACAKYRYETLHADRVLYYIDSRQHQHLMQAWAIVRKAGYVPESVPLEHHMFGMMLGKDGKPFKTRAGGTVKLADLLDEALERARRLVAEKNPDMPADELEKLANAVGIGAVKYADLSKNRTTDYIFDWDNMLAFEGNTAPYMQYAYTRVLSVFRKAEIDEEQLAAAPVIIREDREAQLAARLLQFEETLTVVAREGTPHVMCAYLYDLAGLFSGFYEHCPILSAENEEVRNSRLKLAQLTAKTLKLGLDTLGIETVERM

SEQ ID NO: 10194 - protein, 349 aa, Escherichia coli
MSKIRVLSVDDSALMRQIMTEIINSHSDMEMVATAPDPLVARDLIKKFNPDVLTLDVEMPRMDGLDFLEKLMRLRPMPVVMVSSLTGKGSEVTLRALELGAIDFVTKPQLGIREGMLAYNEMIAEKVRTAAKASLAAHKPLSAPTTLKAGPLLSSEKLIAIGASTGGTEAIRHVLQPLPLSSPALLITQHMPPGFTRSFADRLNKLCQIGVKEAEDGERVLPGHAYIAPGDRHMELSRSGANYQIKIHDGPAVNRHRPSVDVLFHSVAKQAGRNAVGVILTGMGNDGAAGMLAMRQAGAWTLAQNEASCVVFGMPREAINMGGVCEVVDLSQVSQQMLAKISAGQAIRI

SEQ ID NO: 10195 - protein, 182 aa, Escherichia coli
MQFNIPTLLTLFRVILIPFFVLVFYLPVTWSPFAAALIFCVAAVTDWFDGFLARRWNQSTRFGAFLDPVADKVLVAIAMVLVTEHYHSWWVTLPAATMIAREIIISALREWMAELGKRSSVAVSWIGKVKTTAQMVALAWLLWRPNIWVEYAGIALFFVAAVLTLWSMLQYLSAARADLLDQ

SEQ ID NO: 10196 - protein, 250 aa, Escherichia coli
MSAIEVKNLVKKFHGQTVLHGIDLEVKPGEVVAIIGPSGSGKTTLLRSINLLEQPEAGTITVGDITIDTARSLSQQKSLIRQLRQHVGFVFQNFNLFPHRTVLENIIEGPVIVKGEPKEEATARARELLAKVGLAGKETSYPRRLSGGQQQRVAIARALAMRPEVILFDEPTSALDPELVGEVLNTIRQLAQEKRTMVIVTHEMSFARDVADRAIFMDQGRIVEQGAAKALFADPEQPRTRQFLEKFLLQ

SEQ ID NO: 10197 - protein, 266 aa, Escherichia coli
MKLAHLGRQALMGVMAVALVAGMSVKSFADEGLLNKVKERGTLLVGLEGTYPPFSFQGDDGKLTGFEVEFAQQLAKHLGVEASLKPTKWDGMLASLDSKRIDVVINQVTISDERKKKYDFSTPYTISGIQALVKKGNEGTIKTADDLKGKKVGVGLGTNYEEWLRQNVQGVDVRTYDDDPTKYQDLRVGRIDAILVDRLAALDLVKKTNDTLAVTGEAFSRQESGVALRKGNEDLLKAVNDAIAEMQKDGTLQALSEKWFGADVTK

SEQ ID NO: 10198 - protein, 306 aa, Escherichia coli
MRFRQLLPLFGALFALYIIWGSTYFVIRIGVESWPPLMMAGVRFLAAGILLLAFLLLRGHKLPPLRPLLNAALIGLLLLAVGNGMVTVAEHQNVPSGIAAVVVATVPLFTLCFSRLFGIKTRKLEWVGIAIGLAGIIMLNSGGNLSGNPWGAILILIGSISWAFGSVYGSRITLPVGMMAGAIEMLAAGVVLMIASMIAGEKLTALPSLSGFLAVGYLALFGSIIAINAYMYLIRNVSPALATSYAYVNPVVAVLLGTGLGGETLSKIEWLALGVIVFAVVLVTLGKYLFPAKPVVAPVIQDASSE

SEQ ID NO: 10199 - protein, 283 aa, Escherichia coli [sequence omitted]

SEQ ID NO: 10200 - protein, 475 aa, Escherichia coli
MMNDGKQQSTFLFHDYETFGTHPALDRPAQFAAIRTDSEFNVIGEPEVFYCKPADDYLPQPGAVLITGITPQEARAKGENEAAFAARIHSLFTVPKTCILGYNNVRFDDEVTRNIFYRNFYDPYAWSWQHDNSRWDLLDVMRACYALRPEGINWPENDDGLPSFRLEHLTKANGIEHSNAHDAMADVYATIAMAKLVKTRQPRLFDYLFTHRNKHKLMALIDVPQMKPLVHVSGMFGAWRGNTSWVAPLAWHPENRNAVIMVDLAGDISPLLELDSDTLRERLYTAKTDLGDNAAVPVKLVHINKCPVLAQANTLRPEDADRLGINRQHCLDNLKILRENPQVREKVVAIFAEAEPFTPSDNVDAQLYNGFFSDADRAAMKIVLETEPRNLPALDITFVDKRIEKLLFNYRARNFPGTLDYAEQQRWLEHRRQVFTPEFLQGYADELQMLVQQYADDKEKVALLKALWQYAEEIV

SEQ ID NO: 10201 - protein, 468 aa, Escherichia coli
MSKQQIGVVGMAVMGRNLALNIESRGYTVSIFNRSREKTEEVIAENPGKKLVPYYTVKEFVESLETPRRILLMVKAGAGTDAAIDSLKPYLDKGDIIIDGGNTFFQDTIRRNRELSAEGFNFIGTGVSGGEEGALKGPSIMPGGQKEAYELVAPILTKIAAVAEDGEPCVTYIGADGAGHYVKMVHNGIEYGDMQLIAEAYSLLKGGLNLTNEELAQTFTEWNNGELSSYLIDITKDIFTKKDEDGNYLVDVILDEAANKGTGKWTSQSALDLGEPLSLITESVFARYISSLKDQRVAASKVLSGPQAQPAGDKAEFIEKVRRALYLGKIVSYAQGFSQLRAASEEYNWDLNYGEIAKIFRAGCIIRAQFLQKITDAYAENPQIANLLLAPYFKQIADDYQQALRDVVAYAVQNGIPVPTFSAAVAYYDSYRAAVLPANLIQAQRDYFGAHTYKRIDKEGVFHTEWLD

SEQ ID NO: 10202 - protein, 464 aa, Escherichia coli
MTNLKKRERAKTNASLISMVQRFSDITIMFAGLWLVCEVSGLSFLYMHLLVALITLVVFQMLGGITDFYRSWRGVRAATEFALLLQNWTLSVIFSAGLVAFNNDFDTQLKIWLAWYALTSIGLVVCRSCIRIGAGWLRNHGYNKRMVAVAGDLAAGQMLMESFRNQPWLGFEVVGVYHDPKPGGVSNDWAGNLQQLVEDAKAGKIHNVYIAMQMCDGARVKKLVHQLADTTCSVLLIPDVFTFNILHSRLEEMNGVPVVPLYDTPLSGVNRLLKRAEDIVLATLILLLISPVLCCIALAVKLSSPGPVIFRQTRYGMDGKPIKVWKFRSMKVMENDKVVTQATQNDPRVTKVGNFLRRTSLDELPQFINVLTGGMSIVGPRPHAVAHNEQYRQLIEGYMLRHKVKPGITGWAQINGWRGETDTLEKMEKRVEFDLEYIREWSVWFDIKIVFLTVFKGFVNKAAY

SEQ ID NO: 10203 - protein, 1040 aa, Escherichia coli
MQVLPPSSTGGPSRLFIMRPVATTLLMVAILLAGIIGYRALPVSALPEVDYPTIQVVTLYPGASPDVMTSAVTAPLERQFGQMSGLKQMSSQSSGGASVITLQFQLTLPLDVAEQEVQAAINAATNLLPSDLPNPPVYSKVNPADPPIMTLAVTSTAMPMTQVEDMVETRVAQKISQISGVGLVTLSGGQRPAVRVKLNAQAIAALGLTSETVRTAITGANVNSAKGSLDGPSRAVTLSANDQMQSAEEYRQLIIAYQNGAPIRLGDVATVEQGAENSWLGAWANKEQAIVMNVQRQPGANIISTADSIRQMLPQLTESLPKSVKVTVLSDRTTNIRASVDDTQFELMMAIALVVMIIYLFLRNIPATIIPGVAVPLSLIGTFAVMVFLDFSINNLTLMALTIATGFVVDDAIVVIENISRYIEKGEKPLAAALKGAGEIGFTIISLTFSLIAVLIPLLFMGDIVGRLFREFAITLAVAILISAVVSLTLTPMMCARMLSQESLRKQNRFSRASEKMFDRIIAAYGRGLAKVLNHPWLTLSVALSTLLLSVLLWVFIPKGFFPVQDNGIIQGTLQAPQSSSFANMAQRQRQVADVILQDPAVQSLTSFVGVDGTNPSLNSARLQINLKPLDERDDRVQKVIARLQTAVDKVPGVDLFLQPTQDLTIDTQVSRTQYQFTLQATSLDALSTWVPQLMEKLQQLPQLSDVSSDWQDKGLVAYVNVDRDSASRLGISMADVDNALYNAFGQRLISTIYTQANQYRVVLEHNTENTPGLAALDTIRLTSSDGGVVPLSSIAKIEQRFAPLSINHLDQFPVTTISFNVPDNYSLGDAVQAIMDTEKTLNLPVDITTQFQGSTLAFQSALGSTVWLIVAAVVAMYIVLGILYESFIHPITILSTLPTAGVGALLALLIAGSELDVIAIIGIILLIGIVKKNAIMMIDFALAAEREQGMSPREAIYQACLLRFRPILMTTLAALLGALPLMLSTGVGAELRRPLGIGMVGGLIVSQVLTLFTTPVIYLLFDRLALWTKSRFARHEEEA

SEQ ID NO: 10204 - protein, 453 aa, Escherichia coli
MFKPELLSPAGTLKNMRYAFAYGADAVYAGQPRYSLRVRNNEFNHENLQLGINEAHALGKKFYVVVNIAPHNAKLKTFIRDLKPVVEMGPDALIMSDPGLIMLVREHFPEMPIHLSVQANAVNWATVKFWQQMGLTRVILSRELSLEEIEEIRNQVPDMEIEIFVHGALCMAYSGRCLLSGYINKRDPNQGTCTNACRWEYNVQEGKEDDVGNIVHKYEPIPVQNVEPTLGIGAPTDKVFMIEEAQRPGEYMTAFEDEHGTYIMNSKDLRAIAHVERLTKMGVHSLKIEGRTKSFYYCARTAQVYRKAIDDAAAGKPFDTSLLETLEGLAHRGYTEGFLRRHTHDDYQNYEYGYSVSDRQQFVGEFTGERKGDLAAVAVKNKFSVGDSLELMTPQGNINFTLEHMENAKGEAMPIAPGDGYTVWLPVPQDLELNYALLMRNFSGETTRNPHGK

SEQ ID NO: 10205 - protein, 299 aa, Escherichia coli
MAEFPASLLILNGKSTDNLPLREAIMLLREEGMTIHVRVTWEKGDAARYVEEARKFGVATVIAGGGDGTINEVSTALIQCEGDDIPALGILPLGTANDFATSVGIPEALDKALKLAIAGDAIAIDMAQVNKQTCFINMATGGFGTRITTETPEKLKAALGSVSYIIHGLMRMDTLQPDRCEIRGENFHWQGDALVIGIGNGRQAGGGQQLCPNALINDGLLQLRIFTGDEILPALVSTLKSDEDNPNIIEGASSWFDIQAPHDITFNLDGEPLSGQNFHIEILPAALRCRLPPDCPLLR

SEQ ID NO: 10206 - protein, 346 aa, Escherichia coli
MKSVVNDTDGIVRVAESVIPEIKHQDEVRVKIASSGLCGSDLPRIFKNGAHYYPITLGHEFSGYIDAVGSGVDDLHPGDAVACVPLLPCFTCPECLKGFYSQCAKYDFIGSRRDGGFAEYIVVKRKNVFALPTDMPIEDGAFIEPITVGLHAFHLAQGCENKNVIIIGAGTIGLLAIQCAVALGAKSVTAIDISSEKLALAKSFGAMQTFNSSEMSAPQMQSVLRELRFNQLILETAGVPQTVELAVEIAGPHAQLALVGTLHQDLHLTSATFGKILRKELTVIGSWMNYSSPWPGQEWETASRLLTERKLSLEPLIAHRGSFESFAQAVRDIARNAMPGKVLLIP

SEQ ID NO: 10207 - protein, 286 aa, Escherichia coli
MKMYVVSTKQMLNNAQRGGYAVPAFNIHNLETMQVVVETAANLHAPVIIAGTPGTFTHAGTENLLALVSAMAKQYHHPLAIHLDHHTKFDDIAQKVRSGVRSVMIDASHLPFAQNISRVKEVVDFCHRFDVSVEAELGQLGGQEDDVQVNEADALYTNPAQAREFAEATGIDSLAVAIGTAHGMYASAPALDFSRLENIRQWVNLPLVLHGASGLSTKDIQQTIKLGICKINVATELKNAFSQALKNYLTEHPEATDPRDYLQSAKSAMRDVVSKVIADCGCEGRA

SEQ ID NO: 10208 - protein, 262 aa, Escherichia coli
MQVDLLGSAQSAHALHLFHQHSPLVHCMTNDVVQTFTANTLLALGASPAMVIETEEASQFAAIASALLINVGTLTQPRAQAMRAAVEQAKSSQTPWTLDPVAVGALDYRRHFCHELLSFKPAAIRGNASEIMALAGIANGGRGVDTTDAAANAIPAAQTLARETGAIVVVTGEMDYVTDGHRIIGIHGGDPLMTKVVGTGCALSAVVAACCALPGDTLENVASACHWMKQAGERAVARSEGPGSFVPHFLDALWQLTQEVQA

SEQ ID NO: 10209 - protein, 90 aa, Escherichia coli
MSHTIRDKQKLKARASKIQGQVVALKKMLDEPHECAAVLQQIAAIRGAVNGLMREVIKGHLTEHIVHQGDELKREEDLDVVLKVLDSYIK

SEQ ID NO: 10210 - protein, 677 aa, Escherichia coli
MTQVAKKILVTCALPYANGSIHLGHMLEHIQADVWVRYQRMRGHEVNFICADDAHGTPIMLKAQQLGITPEQMIGEMSQEHQTDFAGFNISYDNYHSTHSEENRQLSELIYSRLKENGFIKNRTISQLYDPEKGMFLPDRFVKGTCPKCKSPDQYGDNCEVCGATYSPTELIEPKSVVSGATPVMRDSEHFFFDLPSFSEMLQAWTRSGALQEQVANKMQEWFESGLQQWDISRDAPYFGFEIPNAPGKYFYVWLDAPIGYMGSFKNLCDKRGDSVSFDEYWKKDSTAELYHFIGKDIVYFHSLFWPAMLEGSNFRKPSNLFVHGYVTVNGAKMSKSRGTFIKASTWLNHFDADSLRYYYTAKLSSRIDDIDLNLEDFVQRVNADIVNKVVNLASRNAGFINKRFDGVLASELADPQLYKTFTDAAEVIGEAWESREFGKAVREIMALADLANRYVDEQAPWVVAKQEGRDADLQAICSMGINLFRVLMTYLKPVLPKLTERAEAFLNTELTWDGIQQPLLGHKVNPFKALYNRIDMRQVEALVEASKEEVKAAAAPVTGPLADDPIQETITFDDFAKVDLRVALIENAEFVEGSDKLLRLTLDLGGEKRNVFSGIRSAYPDPQALIGRHTIMVANLAPRKMRFGISEGMVMAAGPGGKDIFLLSPDAGAKPGHQVK

SEQ ID NO: 10211 - protein, 561 aa, Escherichia coli
MYDFNLVLLLLQQMCVFLVIAWLMSKTPLFIPLMQVTVRLPHKFLCYIVFSIFCIMGTWFGLHIDDSIANTRAIGAVMGGLLGGPVVGGLVGLTGGLHRYSMGGMTALSCMISTIVEGLLGGLVHSILIRRGRTDKVFNPITAGAVTFVAEMVQMLIILAIARPYEDAVRLVSNIAAPMMVTNTVGAALFMRILLDKRAMFEKYTSAFSATALKVAASTEGILRQGFNEVNSMKVAQVLYQELDIGAVAITDREKLLAFTGIGDDHHLPGKPISSTYTLKAIETGEVVYADGNEVPYRCSLHPQCKLGSTLVIPLRGENQRVMGTIKLYEAKNRLFSSINRTLGEGIAQLLSAQILAGQYERQKAMLTQSEIKLLHAQVNPHFLFNALNTIKAVIRRDSEQASQLVQYLSTFFRKNLKRPSEFVTLADEIEHVNAYLQIEKARFQSRLQVNIAIPQELSQQQLPAFTLQPIVENAIKHGTSQLLDTGRVAISARREGQHLMLEIEDNAGLYQPVTNASGLGMNLVDKRLRERFGDDYGISVACEPDSYTRITLRLPWRDEA

SEQ ID NO: 10212 - protein, 308 aa, Escherichia coli
MIEFSHVSKLFGAQKAVNDLNLNFQEGSFSVLIGTSGSGKSTTLKMINRLVEHDSGEIRFAGEEIRSLPVLELRRRMGYAIQSIGLFPHWSVAQNIATVPQLQKWSRARIDDRIDELMALLGLESNLRERYPHQLSGGQQQRVGVARALAADPQVLLMDEPFGALDPVTRGALQQEMTRIHRLLGRTIVLVTHDIDEALRLAEHLVLMDHGEVVQQGNPLTMLTRPANDFVRQFFGRSELGVRLLSLRSVADYVRREERADGEALAEEMTLRDALSLFVARGCEVLPVVNMQGQPCGTLHFQDLLVEA

SEQ ID NO: 10213 - protein, 315 aa, Escherichia coli
MRVLLAPMEGVLDSLVRELLTEVNDYDLCITEFVRVVDQLLPVKVFHRICPELQNASRTPSGTLVRVQLLGQFPQWLAENAARAVELGSWGVDLNCGCPSKTVNGSGGGATLLKDPELIYQGAKAMREAVPAHLPVSVKVRLGWDSGEKKFEIADAVQQAGATELVVHGRTKEQGYRAEHIDWQAIGDIRQRLNIPVIANGEIWDWQSAQQCMAISGCDAVMIGRGALNIPNLSRVVKYNEPRMPWPEVVALLQKYTRLEKQGDTGLYHVARIKQWLSYLRKEYDEATELFQHVRVLNNSPDIARAIQAIDIEKL

SEQ ID NO: 10214 - protein, 506 aa, Escherichia coli [sequence omitted]

SEQ ID NO: 10215 - protein, 489 aa, Escherichia coli
MVSETKTTEAPGLRRELKARHLTMIAIGGSIGTGLFVASGATISQAGPGGALLSYMLIGLMVYFLMTSLGELAAYMPVSGSFATYGQNYVEEGFGFALGWNYWYNWAVTIAVDLVAAQLVMSWWFPDTPGWIWSALFLGVIFLLNYISVRGFGEAEYWFSLIKVTTVIVFIIVGVLMIIGIFKGAQPAGWSNWTIGEAPFAGGFAAMIGVAMIVGFSFQGTELIGIAAGESEDPAKNIPRAVRQVFWRILLFYVFAILIISLIIPYTDPSLLRNDVKDISVSPFTLVFQHAGLLSAAAVMNAVILTAVLSAGNSGMYASTRMLYTLACDGKAPRIFAKLSRGGVPRNALYATTVIAGLCFLTSMFGNQTVYLWLLNTSGMTGFIAWLGIAISHYRFRRGYVLQGHDINDLPYRSGFFPLGPIFAFILCLIITLGQNYEAFLKDTIDWGGVAATYIGIPLFLIIWFGYKLIKGTHFVRYSEMKFPQNDKK

SEQ ID NO: 10216 - protein, 285 aa, Escherichia coli
MKYIGAHVSAAGGLANAAIRAAEIDATAFALFTKNQRQWRAAPLTTQTIDEFKAACEKYHYTSAQILPHDSYLINLGHPVTEALEKSRDAFIDEMQRCEQLGLSLLNFHPGSHLMQISEEDCLARIAESINIALDKTQGVTAVIENTAGQGSNLGFKFEHLAAIIDGVEDKSRVGVCIDTCHAFAAGYDLRTPAECEKTFADFARTVGFKYLRGMHLNDAKSTFGSRVDRHHSLGEGNIGHDAFRWIMQDDRFDGIPLILETINPDIWAEEIAWLKAQQTEKAVA

SEQ ID NO: 10217 - protein, 312 aa, Escherichia coli
MSELKISPELLQISPEVQDALKNKKPVVALESTIISHGMPFPQNAQTAIEVEETIRKQGAVPATIAIIGGVMKVGLSKEEIELLGREGHNVTKVSRRDLPFVVAAGKNGATTVASTMIIAALAGIKVFATGGIGGVHRGAEHTFDISADLQELANTNVTVVCAGAKSILDLGLTTEYLETFGVPLIGYQTKALPAFFCRTSPFDVSIRLDSASEIARAMVVKWQSGLNGGLVVANPIPEQFAMPEHTINAAIDQAVAEAEAQGVIGKESTPFLLARVAELTGGDSLKSNIQLVFNNAILASEIAKEYQRLAG

SEQ ID NO: 10218 - protein, 563 aa, Escherichia coli
MKTLLIIDANLGQARAYMAKTLLGAAARKAKLEIIDNPNDAEMAIVLGDSIPNDSALNGKNVWLGDISRAVAHPELFLSEAKGHAKPYTAPVAATAPVAASGPKRVVAVTACPTGVAHTFMAAEAIETEAKKRGWWVKVETRGSVGAGNAITPEEVAAADLVIVAADIEVDLAKFAGKPMYRTSTGLALKKTAQELDKAVAEATPYEPAGKAQTATTESKKESAGAYRHLLTGVSYMLPMVVAGGLCIALSFAFGIEAFKEPGTLAAALMQIGGGSAFALMVPVLAGYIAFSIADRPGLTPGLIGGMLAVSTGSGFIGGIIAGFLAGYIAKLISTQLKLPQSMEALKPILIIPLISSLVVGLAMIYLIGKPVAGILEGLTHWLQTMGTANAVLLGAILGGMMCTDMGGPVNKAAYAFGVGLLSTQTYGPMAAIMAAGMVPPLAMGLATMVARRKFDKAQQEGGKAALVLGLCFISEGAIPFAARDPMRVLPCCIVGGALTGAISMAIGAKLMAPHGGLFVLLIPGAITPVLGYLVAIIAGTLVAGLAYAFLKRPEVDAVAKAA

SEQ ID NO: 10219 - protein, 312 aa, Escherichia coli
MSRRVATITLNPAYDLVGFCPEIERGEVNLVKTTGLHAAGKGINVAKVLKDLGIDVTVGGFLGKDNQDGFQQLFSELGIANRFQVVQGRTRINVKLTEKDGEVTDFNFSGFEVTPADWERFVTDSLSWLGQFDMVCVSGSLPSGVSPEAFTDWMTRLRSQCPCIIFDSSREALVAGLKAAPWLVKPNRRELEIWAGRKLPEMKDVIEAAHALREQGIAHVVISLGAEGALWVNASGEWIAKPPSVDVVSTVGAGDSMVGGLIYGLLMRESSEHTLRLATAVAALAVSQSNVGITDRPQLAAMMARVDLQPFN

SEQ ID NO: 10220 - protein, 376 aa, Escherichia coli
MFQLSVQDIHPGEKAGDKEEAIRQVAAALVQAGNVAEGYVNGMLAREQQTSTFLGNGIAIPHGTTDTRDQVLKTGVQVFQFPEGVTWGDGQVAYVAIGIAASSDEHLGLLRQLTHVLSDDSVAEQLKSATTAEELRALLMGEKQSEQLKLDNEMLTLDIVASDLLTLQALNAARLKEAGAVDATFVTKAINEQPLNLGQGIWLSDSAEGNLRSAIAVSRAANAFDVDGETAAMLVSVAMNDDQPIAVLKRLADLLLDNKADRLLKADAATLLALLTSDDAPTDDVLSAEFVVRNEHGLHARPGTMLVNTIKQFNSDITVTNLDGTGKPANGRSLMKVVALGVKKGHRLRFTAQGADAEQALKAIGDAIAAGLGEGA

SEQ ID NO: 10221 - protein, 231 aa, Escherichia coli
MRLDKFIAQQLGVSRAIAGREIRGNRVTVDGEIVRNAAFKLLPEHDVAYDGNPLAQQHGPRYFMLNKPQGYVCSTDDPDHPTVLYFLDEPVAWKLHAAGRLDIDTTGLVLMTDDGQWSHRITSPRHHCEKTYLVTLESPVADDTAEQFAKGVQLHNEKDLTKPAVLEVITPTQVRLTISEGRYHQVKRMFAAVGNHVVELHRERIGGITLDADLAPGEYRPLTEEEIASVV

SEQ ID NO: 10222 - protein, 586 aa, Escherichia coli [sequence omitted]

SEQ ID NO: 10223 - protein, 548 aa, Escherichia coli [sequence omitted]

SEQ ID NO: 10224 - protein, 875 aa, Escherichia coli
MSDLAREITPVNIEEELKSSYLDYAMSVIVGRALPDVRDGLKPVHRRVLYAMNVLGNDWNKAYKKSARVVGDVIGKYHPHGDSAVYDTIVRMAQPFSLRYMLVDGQGNFGSIDGDSAAAMRYTEIRLAKIAHELMADLEKETVDFVDNYDGTEKIPDVMPTKIPNLLVNGSSGIAVGMATNIPPHNLTEVINGCLAYIDDEDISIEGLMEHIPGPDFPTAAIINGRRGIEEAYRTGRGKVYIRARAEVEVDAKTGRETIIVHEIPYQVNKARLIEKIAELVKEKRVEGISALRDESDKDGMRIVIEVKRDAVGEVVLNNLYSQTQLQVSFGINMVALHHGQPKIMNLKDIIAAFVRHRREVVTRRTIFELRKARDRAHILEALAVALANIDPIIELIRHAPTPAEAKTALVANPWQLGNVAAMLERAGDDAARPEWLEPEFGVRDGLYYLTEQQAQAILDLRLQKLTGLEHEKLLDEYKELLDQIAELLRILGSADRLMEVIREELELVREQFGDKRRTEITANSADINLEDLITQEDVVVTLSHQGYVKYQPLSEYEAQRRGGKGKSAARIKEEDFIDRLLVANTHDHILCFSSRGRVYSMKVYQLPEATRGARGRPIVNLLPLEQDERITAILPVTEFEEGVKVFMATANGTVKKTVLTEFNRLRTAGKVAIKLVDGDELIGVDLTSGEDEVMLFSAEGKVVRFKESSVRAMGCNTTGVRGIRLGEGDKVVSLIVPRGDGAILTATQNGYGKRTAVAEYPTKSRATKGVISIKVTERNGLVVGAVQVDDCDQIMMITDAGTLVRTRVSEISIVGRNTQGVILIRTAEDENVVGLQRVAEPVDEEDLDTIDGSAAEGDDEIAPEVDVDDEPEEE

SEQ ID NO: 10225 - protein, 613 aa, Escherichia coli
MNMLALTIILPLIGFVLLAFSRGRWSENVSAIVGVGSVGLAALVTAFIGVDFFANGEQTYSQPLWTWMSVGDFNIGFNLVLDGLSLTMLSVVTGVGFLIHMYASWYMRGEEGYSRFFAYTNLFIASMVVLVLADNLLLMYLGWEGVGLCSYLLIGFYYTDPKNGAAAMKAFVVTRVGDVFLAFALFILYNELGTLNFREMVELAPAHFADGNNMLMWATLMLLGGAVGKSAQLPLQTWLADAMAGPTPVSALIHAATMVTAGVYLIARTHGLFLMTPEVLHLVGIVGAVTLLLAGFAALVQTDIKRVLAYSTMSQIGYMFLALGVQAWDAAIFHLMTHAFFKALLFLASGSVILACHHEQNIFKMGGLRKSIPLVYLCFLVGGAALSALPLVTAGFFSKDEILAGAMANGHINLMVAGLVGAFMTSLYTFRMIFIVFHGKEQIHAHAVKGVTHSLPLIVLLILSTFVGALIVPPLQGVLPQTTELAHGSMLTLEITSGVVAVVGILLAAWLWLGKRTLVTSIANSAPGRLLGTWWYNAWGFDWLYDKVFVKPFLGIAWLLKRDPLNSMMNIPAVLSRFAGKGLLLSENGYLRWYVASMSIGAVVVLALLMVLR

SEQ ID NO: 10226 - protein, 445 aa, Escherichia coli
MKNIIRTPETHPLTWRLRDDKQPVWLDEYRSKNGYEGARKALTGLSPDEIVNQVKDAGLKGRGGAGFSTGLKWSLMPKDESMNIRYLLCNADEMEPGTYKDRLLMEQLPHLLVEGMLISAFALKAYRGYIFLRGEYIEAAVNLRRAIAEATEAGLLGKNIMGTGFDFELFVHTGAGRYICGEETALINSLEGRRANPRSKPPFPATSGAWGKPTCVNNVETLCNVPAILANGVEWYQNISKSKDAGTKLMGFSGRVKNPGLWELPFGTTAREILEDYAGGMRDGLKFKAWQPGGAGTDFLTEAHLDLPMEFESIGKAGSRLGTALAMAVDHEINMVSLVRNLEEFFARESCGWCTPCRDGLPWSVKILRALERGEGQPGDIETLEQLCRFLGPGKTFCAHAPGAVEPLQSAIKYFREEFEAGIKQPFSNTHLINGIQPNLLKERW

SEQ ID NO: 10227 - protein, 714 aa, Escherichia coli
MSRIIMLIPTGTSVGLTSVSLGVIRAMERKGVRLSVFKPIAQPRTGGDAPDQTTTIVRANSSTTTAAEPLKMSYVEGLLSSNQKDVLMEEIVANYHANTKDAEVVLVEGLVPTRKHQFAQSLNYEIAKTLNAEIVFVMSQGTDTPEQLKERIELTRNSFGGAKNTNITGVIVNKLNAPVDEQGRTRPDLSEIFDDSSKAKVNNVDPAKLQESSPLPVLGAVPWSFDLIATRAIDMARHLNATIINEGDINTRRVKSVTFCARSIPHMLEHFRAGSLLVTSADRPDVLVAACLAAMNGVEIGALLLTGGYEMDARISKLCERAFATGLPVFMVNTNTWQTSLSLQSFNLEVPVDDHERIEKVQEYVANYINADWIESLTATSERSRRLSPPAFRYQLTELARKAGKRIVLPEGDEPRTVKAAAICAERGIATCVLLGNPAEINRVAASQGVELGAGIEIVDPEVVRESYVGRLVELRKNKGMTETVAREQLEDNVVLGTLMLEQDEVDGLVSGAVHTTANTIRPPLQLIKTAPGSSLVSSVFFMLLPEQVYVYGDCAINPDPTAEQLAEIAIQSADSAAAFGIEPRVAMLSYSTGTSGAGSDVEKVREATRLAQEKRPDLMIDGPLQYDAAVMADVAKSKAPNSPVAGRATVFIFPDLNTGNTTYKAVQRSADLISIGPMLQGMRKPVNDLSRGALVDDIVYTIALTAIQSAQQQ

SEQ ID NO: 10228 - protein, 297 aa, Escherichia coli
MNIVITGGTGLIGRHLIPRLLELGHQITVVTRNPQKASSVLGPRVTLWQGLADQSNLNGVDAVINLAGEPIADKRWTHEQKERLCQSRWNITQKLVDLINASDTPPSVLISGSATGYYGDLGEVVVTEEEPPHNEFTHKLCARWEEIACRAQSDKTRVCLLRTGVVLAPDGGILGKMLPPFRLGLGGPIGSGRQYLAWIHIDDMVNGILWLLDNELRGPFNMVSPYPVRNEQFAHALGHALHRPAILRVPATAIRLLMGESSVLVLGGQRALPKRLEEAGFAFRWYDLEEALADVVR

SEQ ID NO: 10229 - protein, 189 aa, Escherichia coli
MKRLIVGISGASGAIYGVRLLQVLRDVTDIETHLVMSQAARQTLSLETDFSLREVQALADVTHDARDIAASISSGSFQTLGMVILPCSIKTLSGIVHSYTDGLLTRAADVVLKERRPLVLCVRETPLHLGHLRLMTQAAEIGAVIMPPVPAFYHRPQSLDDVINQTVNRVLDQFAITLPEDLFARWQGA

SEQ ID NO: 10230 - protein, 304 aa, Escherichia coli
MSWIERIKSNITPTRKASIPEGVWTKCDSCGQVLYRAELERNLEVCPKCDHHMRMTARNRLHSLLDEGSLVELGSELEPKDVLKFRDSKKYKDRLASAQKETGEKDALVVMKGTLYGMPVVAAAFEFAFMGGSMGSVVGARFVRAVEQALEDNCPLICFSASGGARMQEALMSLMQMAKTSAALAKMQERGLPYISVLTDPTMGGVSASFAMLGDLNIAEPKALIGFAGPRVIEQTVREKLPPGFQRSEFLIEKGAIDMIVRRPEMRLKLASILAKLMNLPAPNPEAPREGVVVPPVPDQEPEA

SEQ ID NO: 10231 - protein, 337 aa, Escherichia coli
MSEGWNIAVLGATGAVGEALLETLAERQFPVGEIYALARNESAGEQLRFGGKTITVQDAAEFDWTQAQLAFFVAGKEATAAWVEEATNSGCLVIDSSGLFALEPDVPLVVPEVNPFVLTDYRNRNVIAVPDSLTSQLLAALKPLIDQGGLSRISVTSLISASAQGKKAVDALAGQSAKLLNGIPIDEEDFFGRQLAFNMLPLLPDSEGSVREERRIVDEVRKILQDEGLMISASVVQAPVFYGHAQMVNFEALRPLAAEEARDAFVQGEDIVLSEENEFPTQVGDASGTPHLSVGCVRNDYGMPEQVQFWSVADNVRFGGALMAVKIAEKLVQEYLY

SEQ ID NO: 10232 - protein, 361 aa, Escherichia coli
MAGNTIGQLFRVTTFGESHGLALGCIVDGVPPGIPLTEADLQHDLDRRRPGTSRYTTQRREPDQVKILSGVFEGVTTGTSIGLLIENTDQRSQDYSAIKDVFRPGHADYTYEQKYGLRDYRGGGRSSARETAMRVAAGAIAKKYLAEKFGIEIRGCLTQMGDIPLDIKDWSQVEQNPFFCPDPDKIDALDELMRALKKEGDSIGAKVTVVASGVPAGLGEPVFDRLDADIAHALMSINAVKGVEIGDGFDVVALRGSQNRDEITKDGFQSNHAGGILGGISSGQQIIAHMALKPTSSITVPGRTINRFGEEVEMITKGRHDPCVGIRAVPIAEAMLAIVLMDHLLRQRAQNADVKTDIPRW

SEQ ID NO: 10233 - protein, 394 aa, Escherichia coli
MSFHLRLFSRHKQMTNNESKGPFEGLLVIDMTHVLNGPFGTQLLCNMGARVIKVEPPGHGDDTRTFGPYVDGQSLYYSFINHGKESVVLDLKNDHDKSIFINMLKQADVLAENFRPGTMEKLGFSWETLQEINPRLIYASSSGFGHTGPLKDAPAYDTIIQAMSGIMMETGYPDAPPVRVGTSLADLCGGVYLFSGIVSALYGREKSQRGAHVDIAMFDATLSFLEHGLMAYIATGKSPQRLGNRHPYMAPFDVFNTQDKPITICCGNDKLFSALCQALELTELVNDPRFSSNILRVQNQAILKQYIERTLKTQAAEVWLARIHEVGVPVAPLLSVAEAIKLPQTQARNMLIEAGGIMMPGNPIKISGCADPHVMPGAATLDQHGEQIRQEFSS

SEQ ID NO: 10234 - protein, 244 aa, Escherichia coli
MKVIIVEDEFLAQQELSWLIKEHSQMEIVGTFDDGLDVLKFLQHNRVDAIFLDINIPSLDGVLLAQNISQFAHKPFIVFITAWKEHAVEAFELEAFDYILKPYQESRITGMLQKLEAAWQQQQTSSTPAATVTRENDTINLVKDERIIVTPINDIYYAEAHEKMTFVYTRRESYVMPMNITEFCSKLPPSHFFRCHRSFCVNLNKIREIEPWFNNTYILRLKDLDFEVPVSRSKVKEFRQLMHL

SEQ ID NO: 10235 - protein, 361 aa, Escherichia coli
MTLLASLRDWLKAQQLDAVLLSSRQNKQPHLGISTGSGYVVISRESAHILVDSRYYVEVEARAQGYQLHLLDATNTLTTIVNQIIADEQLQTLGFEGQQVSWETAHRWQSELNAKLVSATPDVLRQIKTPEEVEKIRLACGIADRGAEHIRRFIQAGMSEREIAAELEWFMRQQGAEKASFDTIVASGWRGALPHGKASDKIVAAGEFVTLDFGALYQGYCSDMTRTLLVNGEGVSAESHLLFNVYQIVLQAQLAAISAIRPGVRCQQVDDAARRVITEAGYGDYFGHNTGHAIGIEVHEDPRFSPRDTTTLQPGMLLTVEPGIYLPGQGGVRIEDVVLVTPQGAEVLYAMPKTVLLTGEA

SEQ ID NO: 10236 - protein, 412 aa, Escherichia coli
MTNYRVESSSGRAARKMRLALMGPAFIAAIGYIDPGNFATNIQAGASFGYQLLWVVVWANLMAMLIQILSAKLGIATGKNLAEQIRDHYPRPVVWFYWVQAEIIAMATDLAEFIGAAIGFKLILGVSLLQGAVLTGIATFLILMLQRRGQKPLEKVIGGLLLFVAAAYIVELIFSQPNLAQLGKGMVIPSLPTSEAVFLAAGVLGATIMPHVIYLHSSLTQHLHGGSRQQRYSATKWDVAIAMTIAGFVNLAMMATAAAAFHFSGHTGVADLDEAYLTLQPLLSHAAATVFGLSLVAAGLSSTVVGTLAGQVVMQGFIRFHIPLWVRRTVTMLPSFIVILMGLDPTRILVMSQVLLSFGIALALVPLLIFTSDSKLMGDLVNSKRVKQTGWVIVVLVVALNIWLLVGTALGL

SEQ ID NO: 10237 - protein, 471 aa, Escherichia coli
MKIKTRFAPSPTGYLHVGGARTALYSWLFARNHGGEFVLRIEDTDLERSTPEAIEAIMDGMNWLSLEWDEGPYYQTKRFDRYNAVIDQMLEEGTAYKCYCSKERLEALREEQMAKGEKPRYDGRCRHSHEHHADDEPCVVRFANPQEGSVVFDDQIRGPIEFSNQELDDLIIRRTDGSPTYNFCVVVDDWDMEITHVIRGEDHINNTPRQINILKALKAPVPVYAHVSMINGDDGKKLSKRHGAVSVMQYRDDGYLPEALLNYLVRLGWSHGDQEIFTREEMIKYFTLNAVSKSASAFNTDKLLWLNHHYINALPPEYVATHLQWHIEQENIDTRNGPQLADLVKLLGERCKTLKEMAQSCRYFYEDFAEFDADAAKKHLRPVARQPLEVVRDKLAAITDWTAENVHHAIQATADELEVGMGKVGMPLRVAVTGAGQSPALDVTVHAIGKTRSIERINKALDFIAERENQQ

SEQ ID NO: 10238 - protein, 671 aa, Escherichia coli
MESIEQQLTELRTTLRHHEYLYHVMDAPEIPDAEYDRLMRELRELETKHPELITPDSPTQRVGAAPLAAFSQIRHEVPMLSLDNVFDEESFLAFNKRVQDRLKNNEKVTWCCELKLDGLAVSILYENGVLVSAATRGDGTTGEDITSNVRTIRAIPLKLHGENIPARLEVRGEVFLPQAGFEKINEDARRTGGKVFANPRNAAAGSLRQLDPRITAKRPLTFFCYGVGVLEGGELPDTHLGRLLQFKKWGLPVSDRVTLCESAEEVLAFYHKVEEDRPTLGFDIDGVVIKVNSLAQQEQLGFVARAPRWAVAFKFPAQEQMTFVRDVEFQVGRTGAITPVARLEPVHVAGVLVSNATLHNADEIERLGLRIGDKVVIRRAGDVIPQVVNVVLSERPEDTREVVFPTHCPVCGSDVERVEGEAVARCTGGLICGAQRKESLKHFVSRRAMDVDGMGDKIIDQLVEKEYVHTPADLFKLTAGKLTGLERMGPKSAQNVVNALEKAKETTFARFLYALGIREVGEATAAGLAAYFGTLEALEAASIEELQKVPDVGIVVASHVHNFFAEESNRNVISELLAEGVHWPAPIVINAEEIDSPFAGKTVVLTGSLSQMSRDDAKARLVELGAKVAGSVSKKTDLVIAGEAAGSKLAKAQELGIEVIDEAEMLRLLGS

SEQ ID NO: 10239 - protein, 323 aa, Escherichia coli
MSKIFEDNSLTIGHTPLVRLNRIGNGRILAKVESRNPSFSVKCRIGANMIWDAEKRGVLKPGVELVEPTSGNTGIALAYVAAARGYKLTLTMPETMSIERRKLLKALGANLVLTEGAKGMKGAIQKAEEIVASNPEKYLLLQQFSNPANPEIHEKTTGPEIWEDTDGQVDVFIAGVGTGGTLTGVSRYIKGTKGKTDLISVAVEPTDSPVIAQALAGEEIKPGPHKIQGIGAGFIPANLDLKLVDKVIGITNEEAISTARRLMEEEGILAGISSGAAVAAALKLQEDESFTNKNIVVILPSSGERYLSTALFADLFTEKELQQ

SEQ ID NO: 10240 - protein, 575 aa, Escherichia coli
MISGILASPGIAFGKALLLKEDEIVIDRKKISADQVDQEVERFLSGRAKASAQLETIKTKAGETFGEEKEAIFEGHIMLLEDEELEQEIIALIKDKHMTADAAAHEVIEGQASALEELDDEYLKERAADVRDIGKRLLRNILGLKIIDLSAIQDEVILVAADLTPSETAQLNLKKVLGFITDAGGRTSHTSIMARSLELPAIVGTGSVTSQVKNDDYLILDAVNNQVYVNPTNEVIDKMRAVQEQVASEKAELAKLKDLPAITLDGHQVEVCANIGTVRDVEGAERNGAEGVGLYRTEFLFMDRDALPTEEEQFAAYKAVAEACGSQAVIVRTMDIGGDKELPYMNFPKEENPFLGWRAIRIAMDRREILRDQLRAILRASAFGKLRIMFPMIISVEEVRALRKEIEIYKQELRDEGKAFDESIEIGVMVETPAAATIARHLAKEVDFFSIGTNDLTQYTLAVDRGNDMISHLYQPMSPSVLNLIKQVIDASHAEGKWTGMCGELAGDERATLLLLGMGLDEFSMSAISIPRIKKIIRNTNFEDAKVLAEQALAQPTTDELMTLVNKFIEEKTIC

SEQ ID NO: 10241 - protein, 285 aa, Escherichia coli
MFILYFQREWSVTLCINKESIKMGKLTGKTALITGALQGIGEGIARTFARHGANLILLDISPEIEKLADELCGRGHRCTAVVADVRDPASVAAAIKRAKEKEGRIDILVNNAGVCRLGSFLDMSDDDRDFHIDINIKGVWNVTKAVLPEMIARKDGRIVMMSSVTGDMVADPGETAYALTKAAIVGLTKSLAVEYAQSGIRVNAICPGYVRTPMAESIARQSNPEDPESVLTEMAKAIPMRRLADPLEVGELAAFLASDESSYLTGTQNVIDGGSTLPETVSVGI

SEQ ID NO: 10242 - protein, 298 aa, Escherichia coli
MQFEKMITEGSNTASAEIDRVSTLEMCRIINDEDKTVPLAVERVLPDIAAAIDVIHAQVSGGGRLIYLGAGTSGRLGILDASECPPTYGVKPGLVVGLIAGGEYAIQHAVEGAEDSREGGVNDLKNINLTAQDVVVGIAASGRTPYVIAGLEYARQLGCRTVGISCNPGSAVSTTAEFAITPIVGAEVVTGSSRMKAGTAQKLVLNMLSTGLMIKSGKVFGNLMVDVVATNEKLHVRQVNIVKNATGCSAEQAEAALIACERNCKTAIVMVLKNLDAAEAKKRLDQHGGFIRQVLDKE

SEQ ID NO: 10243 - protein, 474 aa, Escherichia coli
MAKEISSELLNTILTRVGGPGNIASCGNCMTRLRLGVHDSSLVDPNIKTLEGVKGVILTSDQVQVVFGPGKAHRAAKAMSELLGEAPVQDAAEIAAQNKRQLKAKQTSGVQQFLAKFATIFTPLIPGFIAAGLLLGIATLIATVMHVPADAQGTLPDALNFMKVFSKGLFTFLVILVGYNAAQAFGGTGVNGAIIAALFLLGYNPAATTGYYAGFHDFFGLPIDPRGNIIGVLIAAWACARIEGMVRRFMPDDLDMLLTSLITLLITATLAYLIIMPLGGWLFEGMSWLFMHLNSNPFGCAVLAGLFLIAVVFGVHQGFIPVYLALMDSQGFNSLFPILSMAGAGQVGAALALYWRAQPHSALRSQVRGAIIPGLLGVGEPLIYGVTLPRMKPFVTACLGGAAGGLFIGLIAWWGLPMGLNSAFGPSGLVALPLMTSAQGILPAMAVYAGGILVAWVCGFIFTTLFGCRNVNLD

SEQ ID NO: 10244 - protein, 467 aa, Escherichia coli
MKNANHRFFLRERLMKLKTTLFGNVYQFKDVKEVLAKANELRSGDVLAGVAAASSQERVAAKQVLSEMTVADIRNNPVIAYEDDCVTRLIQDDVNETAYNQIKNWSISELREYVLSDETSVDDIAFTRKGLTSEVVAAVAKICSNADLIYGAKKMPVIKKANTTIGIPGTFSARLQPNDTRDDVQSIAAQIYEGLSFGVGDAVIGVNPVTDDVENLSRVLDTIYGVIDKFNIPTQGCVLAHVTTQIEAIRRGAPGGLIFQSICGSEKGLKEFGVELAMLDEARAVGAEFNRIAGENCLYFETGQGSALSAGANFGADQVTMEARNYGLARHYDPFIVNTVVGFIGPEYLYNDRQIIRAGLEDHFMGKLSGISMGCDCCYTNHADADQNLNENLMILLATAGCNYIMGMPLGDDIMLNYQTTAFHDTATVRQLLNLRPSPEFERWLESMGIMANGRLTKRAGDPSLFF

SEQ ID NO: 10245 - protein, 667 aa, Escherichia coli
MSRKDLANAIRALSMDAVQKANSGHPGAPMGMADIAEVLWNDFLKHNPTDPTWYDRDRFILSNGHASMLLYSLLHLTGYDLPLEELKNFRQLHSKTPGHPEIGYTPGVETTTGPLGQGLANAVGLAIAERTLAAQFNQPDHEIVDHFTYVFMGDGCLMEGISHEVCSLAGTLGLGKLIGFYDHNGISIDGETEGWFTDDTAKRFEAYHWHVIHEIDGHDPQAVKEAILEAQSVKDKPSLIICRTVIGFGSPNKAGKEEAHGAPLGEEEVALARQKLGWHHPPFEIPKEIYHAWDAREKGEKAQQSWNEKFAAYKKAHPQLAEEFTRRMSGGLPKDWEKTTQKYINELQANPAKIATRKASQNTLNAYGPMLPELLGGSADLAPSNLTIWKGSVSLKEDPAGNYIHYGVREFGMTAIANGIAHHGGFVPYTATFLMFVEYARNAARMAALMKARQIMVYTHDSIGLGEDGPTHQAVEQLASLRLTPNFSTWRPCDQVEAAVGWKLAVERHNGPTALILSRQNLAQVERTPDQVKEIARGGYVLKDSGGKPDIILIATGSEMEITLQAAEKLAGEGRNVRVVSLPSTDIFDAQDEEYRESVLPSNVAARVAVEAGIADYWYKYVGLKGAIVGMTGYGESAPADKLFPFFGFTAENIVAKAHKVLGVKGA

SEQ ID NO: 10246 - protein, 659 aa, Escherichia coli
MNRFIMANSQQCLGCHACEIACVMAHNDEQHVLSQHHFHPRITVIKHQQQRSAVTCHHCEDAPCARSCPNGAISHVDDSIQVNQQKCIGCKSCVVACPFGTMQIVLTPVAAGKVKATAHKCDLCAGRENGPACVENCPADALQLVTDVALSGMAKSRRLRTARQEHQPWHASTAAQEMPVMSKVEQMQATPARGEPDKLAIEARKTGFDEIYLPFRADQAQREASRCLKCGEHSVCEWTCPLHNHIPQWIELVKAGNIDAAVELSHQTNTLPEITGRVCPQDRLCEGACTIRDEHGAVTIGNIERYISDQALAKGWRPDLSHVTKVDKRVAIIGAGPAGLACADVLTRNGVGVTVYDRHPEIGGLLTFGIPSFKLDKSLLARRREIFSAMGIHFELNCEVGKDVSLDSLLEQYDAVFVGVGTYRSMKAGLPNEDAPGVYDALPFLIANTKQVMGLEELPEEPFINTAGLNVVVLGGGDTAMDCVRTALRHGASNVTCAYRRDEANMPGSKKEVKNAREEGANFEFNVQPVALELNEQGHVCGIRFLRTRLGEPDAQGRRRPVPVEGSEFVMPADAVIMAFGFNPHGMPWLESHGVTVDKWGRIIADVESQYRYQTTNPKIFAGGDAVRGADLVVTAMAEGRHAAQGIIDWLGVKSVKSH

SEQ ID NO: 10247 - protein, 248 aa, Escherichia coli
MVNFSRFCEILVEVSLNTPAQLSLPLYLPDDETFASFWPGDNSSLLAALQNVLRQEHSGYIYLWAREGAGRSHLLHAACAELSQRGDAVGYVPLDKRTWFVPEVLDGMEHLSLVCIDNIECIAGDELWEMAIFDLYNRILESGKTRLLITGDRPPRQLNLGLPDLASRLDWGQIYKLQPLSDEDKLQALQLRARLRGFELPEDVGRFLLKRLDREMRTLFMTLDQLDRASITAQRKLTIPFVKEILKL

SEQ ID NO: 10248 - protein, 217 aa, Escherichia coli
MAAPQRRKSMKIVEVKHPLVKHKLGLMREQDISTKRFRELASEVGSLLTYEATADLETEKVTIEGWNGPVEIDQIKGKKITVVPILRAGLGMMDGVLENVPSARISVVGMYRNEETLEPVPYFQKLVSNIDERMALIVDPMLATGGSVIATIDLLKKAGCSSIKVLVLVAAPEGIAALEKAHPDVELYTASIDQGLNEHGYIIPGLGDAGDKIFGTK

SEQ ID NO: 10249 - protein, 525 aa, Escherichia coli
MTENIHKHRILILDFGSQYTQLVARRVRELGVYCELWAWDVTEAQIRDFNPSGIILSGGPESTTEENSPRAPQYVFEAGVPVFGVCYGMQTMAMQLGGHVEASNEREFGYAQVEVVNDSALVRGIEDALTADGKPLLDVWMSHGDKVTAIPSDFITVASTESCPFAIMANEEKRFYGVQFHPEVTHTRQGMRMLERFVRDICQCEALWTPAKIIDDAVARIREQVGDDKVILGLSGGVDSSVTAMLLHRAIGKNLTCVFVDNGLLRLNEAEQVLDMFGDHFGLNIVHVPAEDRFLSALAGENDPEAKRKIIGRVFVEVFDEEALKLEDVKWLAQGTIYPDVIESAASATGKAHVIKSHHNVGGLPKEMKMGLVEPLKELFKDEVRKIGLELGLPYDMLYRHPFPGPGLGVRVLGEVKKEYCDLLRRADAIFIEELRKADLYDKVSQAFTVFLPVRSVGVMGDGRKYDWVVSLRAVETIDFMTAHWAHLPYDFLGRVSNRIINEVNGISRVVYDISGKPPATIEWE

SEQ ID NO: 10250 - protein, 456 aa, Escherichia coli
MLPSQSPAIFTVSRLNQTVRLLLEHEMGQVWISGEISNFTQPASGHWYFTLKDDTAQVRCAMFRNSNRRVTFRPQHGQQVLVRANITLYEPRGDYQIIVESMQPAGEGLLQQKYEQLKAKLQAEGLFDQQYKKPLPSPAHCVGVITSKTGAALHDILHVLKRRDPSLPVIIYPAAVQGDDAPGQIVRAIELANQRNECDVLIVGRGGGSLEDLWSFNDERVARAIFTSRIPVVSAVGHETDVTIADFVADLRAPTPSAAAEVVSRNQQELLRQVQSTRQRLEMAMDYYLANRTRRFTQIHHRLQQQHPQLRLARQQTMLERLQKRMSFALENQLKRTGQQQQRLTQRLNQQNPQPKIHRAQTRIQQLEYRLAETLRAQLSATRERFGNAVTHLEAVSPLSTLARGYSVTTATDGNVLKKVKQVKAGEMLTTRLEDGWIESEVKNIQPVKKSRKKVH

SEQ ID NO: 10251 - protein, 503 aa, Escherichia coli
MRCLMIYKNEALNMVPVVALVGRPNVGKSTLFNRLTRTRDALVADFPGLTRDRKYGRAEIEGREFICIDTGGIDGTEDGVETRMAEQSLLAIEEADVVLFMVDARAGLMPADEAIAKHLRSREKPTFLVANKTDGLDPDQAVVDFYSLGLGEIYPIAASHGRGVLSLLEHVLLPWMEDLAPQEEVDEDAEYWAQFEAEENGEEEEEDDFDPQSLPIKLAIVGRPNVGKSTLTNRILGEERVVVYDMPGTTRDSIYIPMERDGREYVLIDTAGVRKRGKITDAVEKFSVIKTLQAIEDANVVMLVIDAREGISDQDLSLLGFILNSGRSLVIVVNKWDGLSQEVKEQVKETLDFRLGFIDFARVHFISALHGSGVGNLFESVREAYDSSTRRVGTSMLTRIMTMAVEDHQPPLVRGRRVKLKYAHAGGYNPPIVVIHGNQVKDLPDSYKRYLMNYFRKSLDVMGSPIRIQFKEGENPYANKRNTLTPTQMRKRKRLMKHIKKNK

SEQ ID NO: 10252 - protein, 424 aa, Escherichia coli
MAKNIQAIRGMNDYLPGETAIWQRIEGTLKNVLGSYGYSEIRLPIVEQTPLFKRAIGEVTDVVEKEMYTFEDRNGDSLTLRPEGTAGCVRAGIEHGLLYNQEQRLWYIGPMFRHERPQKGRYRQFHQLGCEVFGLQGPDIDAELIMLTARWWRALGISEHVTLELNSIGSLEARANYRDALVAFLEQHKEKLDEDCKRRMYTNPLRVLDSKNPEVQALLNDAPALGDYLDEESREHFAGLCKLLESAGIAYTVNQRLVRGLDYYNRTVFEWVTNSLGSQGTVCAGGRYDGLVEQLGGRATPAVGFAMGLERLVLLVQAVNPEFKADPVVDIYLVASGADTQSAAMALAERLRDELPGVKLMTNHGGGNFKKQFARADKWGARVAVVLGESEVANGTAVVKDLRSGEQTAVAQDSVAAHLRTLLG

SEQ ID NO: 10253 - protein, 453 aa, Escherichia coli
MTTPSDLNIYQLIDTQNGRVTPRIYTDPDIYQLELERIFGRCWLFLAHESQIPKPGDFFNTYMGEDAVVVVRQKDGSIKAFLNQCRHRAMRVSYADCGNTRAFTCPYHGWSYGINGELIDVPLEPRAYPQGLCKSHWGLNEVPCVESYKGLIFGNWDTSAPGLRDYLGDIAWYLDGMLDRREGGTEIVGGVQKWVINCNWKFPAEQFASDQYHALFSHASAVQVLGAKDDGSDKRLGDGQTARPVWETAKDALQFGQDGHGSGFFFTEKPDANVWVDGAVSSYYRETYAEAEQRLGEVRALRLAGHNNIFPTLSWLNGTATLRVWHPRGPDQVEVWAFCITDKAASDEVKAAFENSATRAFGPAGFLEQDDSENWCEIQKLLKGHRARNSKLCLEMGLGQEKRRDDGIPGITNYIFSETAARGMYQRWADLLSSESWQEVLDKTAAYQQEVMK

SEQ ID NO: 10254 - protein, 417 aa, Escherichia coli
MLKREMNIADYDAELWQAMEQEKVRQEEHIELIASENYTSPRVMQAQGSQLTNKYAEGYPGKRYYGGCEYVDIVEQLAIDRAKELFGADYANVQPHSGSQANFAVYTALLEPGDTVLGMNLAHGGHLTHGSPVNFSGKLYNIVPYGIDATGHIDYADLEKQAKEHKPKMIIGGFSAYSGVVDWAKMREIADSIGAYLFVDMAHVAGLVAAGVYPNPVPHAHVVTTTTHKTLAGPRGGLILAKGGSEELYKKLNSAVFPGGQGGPLMHVIAGKAVALKEAMEPEFKTYQQQVAKNAKAMVEVFLERGYKVVSGGTDNHLFLVDLVDKNLTGKEADAALGRANITVNKNSVPNDPKSPFVTSGIRVGTPAITRRGFKEAEAKELAGWMCDVLDSINDEAVIERIKGKVLDICARYPVYA

SEQ ID NO: 10255 - protein, 472 aa, Escherichia coli
MSTIHTPLTYNEINGKPFGLDYELAKQFADYLGVKLKVTVRQNISQLFDDLDNGNADLLAAGLVYNSERVKNYQPGPTYYSVSQQLVYKVGQYRPRTLGNLTAEQLTVAPGHVVVNDLQTLKETKFPELSWKVDDKKGSAELMEDVIEGKLDYTIADSVAISLFQRVHPELAVALDITDEQPVTWFSPLDGDNTLSAALLDFFNEMNEDGTLARIEEKYLGHGDDFDYVDTRTFLRAVDAVLPQLKPLFEKYAEEIDWRLLAAIAYQESHWDAQATSPTGVRGMMMLTKNTAQSLGITDRTDAEQSISGGVRYLQDMMSKVPESVPENERIWFALAAYNMGYAHMLDARALTAKTKGNPDSWADVKQRLPLLSQKPYYSKLTYGYARGHEAYAYVENIRKYQISLVGYLQEKEKQATEAAMQLAQDYPAVSPTELGKEKFPFLSFLSQSSSNYLTHSPSLLFSRKGSEEKQN

SEQ ID NO: 10256 - protein, 126 aa, Escherichia coli
MAILGLGTDIVEIARIEAVIARSGDRLARRVLSDNEWAIWKTHHQPVRFLAKRFAVKEAAAKAFGTGIRNGLAFNQFEVFNDELGKPRLRLWGEALKLAEKLGVANMHVTLADERHYACATVIIES

SEQ ID NO: 10257 - protein, 301 aa, Escherichia coli
MSIDKSYCGFIAIVGRPNVGKSTLLNKLLGQKISITSRKAQTTRHRIVGIHTEGAYQAIYVDTPGLHMEEKRAINRLMNKAASSSIGDVELVIFVVEGTRWTPDDEMVLNKLREGKAPVILAVNKVDNVQEKADLLPHLQFLASQMNFLDIVPISAETGLNVDTIAAIVRKHLPEATHHFPEDYITDRSQRFMASEIIREKLMRFLGAELPYSVTVEIERFVSNERGGYDINGLILVEREGQKKMVIGNKGAKIKTIGIEARKDMQEMFEAPVHLELWVKVKSGWADDERALRSLGYVDDL

SEQ ID NO: 10258 - protein, 857 aa, Escherichia coli
MRLDRLTNKFQLALADAQSLALGHDNQFIEPLHLMSALLNQEGGSVSPLLTSAGINAGQLRTDINQALNRLPQVEGTGGDVQPSQDLVRVLNLCDKLAQKRGDNFISSELFVLAALESRGTLADILKAAGATTANITQAIEQMRGGESVNDQGAEDQRQALKKYTIDLTERAEQGKLDPVIGRDEEIRRTIQVLQRRTKNNPVLIGEPGVGKTAIVEGLAQRIINGEVPEGLKGRRVLALDMGALVAGAKYRGEFEERLKGVLNDLAKQEGNVILFIDELHTMVGAGKADGAMDAGNMLKPALARGELHCVGATTLDEYRQYIEKDAALERRFQKVFVAEPSVEDTIAILRGLKERYELHHHVQITDPAIVAAATLSHRYIADRQLPDKAIDLIDEAASSIRMQIDSKPEELDRLDRRIIQLKLEQQALMKESDEASKKRLDMLNEELSDKERQYSELEEEWKAEKASLSGTQTIKAELEQAKIAIEQARRVGDLARMSELQYGKIPELEKQLEAATQLEGKTMRLLRNKVTDAEIAEVLARWTGIPVSRMMESEREKLLRMEQELHHRVIGQNEAVDAVSNAIRRSRAGLADPNRPIGSFLFLGPTGVGKTELCKALANFMFDSDEAMVRIDMSEFMEKHSVSRLVGAPPGYVGYEEGGYLTEAVRRRPYSVILLDEVEKAHPDVFNILLQVLDDGRLTDGQGRTVDFRNTVVIMTSNLGSDLIQERFGELDYAHMKELVLGVVSHNFRPEFINRIDEVVVFHPLGEQHIASIAQIQLKRLYKRLEERGYEIHISDEALKLLSENGYDPVYGARPLKRAIQQQIENPLAQQILSGELVPGKVIRLEVNEDRIVAVQ

SEQ ID NO: 10259 - protein, 326 aa, Escherichia coli
MAQRVQLTATVSENQLGQRLDQALAEMFPDYSRSRIKEWILDQRVLVNGKVCDKPKEKVLGGEQVAINAEIEEEARFEPQDIPLDIVYEDEDIIIINKPRDLVVHPGAGNPDGTVLNALLHYYPPIADVPRAGIVHRLDKDTTGLMVVAKTVPAQTRLVESLQRREITREYEAVAIGHMTAGGTVDEPISRHPTKRTHMAVHPMGKPAVTHYRIMEHFRVHTRLRLRLETGRTHQIRVHMAHITHPLVGDPVYGGRPRPPKGASEAFISTLRKFDRQALHATMLRLYHPISGIEMEWHAPIPQDMVELIEVMRADFEEHKDEVDWL

SEQ ID NO: 10260 - protein, 115 aa, Escherichia coli [sequence omitted]

SEQ ID NO: 10261 - protein, 255 aa, Escherichia coli
MWIGIISLFPEMFRAITDYGVTGRAVKNGLLSIQSWSPRDFTHDRHRTVDDRPYGGGPGMLMMVQPLRDAIHAAKAAAGEGAKVIYLSPQGRKLDQAGVSELATNQKLILVCGRYEGIDERVIQTEIDEEWSIGDYVLSGGELPAMTLIDSVSRFIPGVLGHEASATEDSFAEGLLDCPHYTRPEVLEGMEVPPVLLSGNHAEIRRWRLKQSLGRTWLRRPELLENLALTEEQARLLAEFKTEHAQQQHKHDGMA

SEQ ID NO: 10262 - protein, 82 aa, Escherichia coli [sequence omitted]

SEQ ID NO: 10263 - protein, 453 aa, Escherichia coli
MFDNLTDRLSRTLRNISGRGRLTEDNVKDTLREVRMALLEADVALPVVREFINRVKEKAVGHEVNKSLTPGQEFVKIVRNELVAAMGEENQTLNLAAQPPAVVLMAGLQGAGKTTSVGKLGKFLREKHKKKVLVVSADVYRPAAIKQLETLAEQVGVDFFPSDVGQKPVDIVNAALKEAKLKFYDVLLVDTAGRLHVDEAMMDEIKQVHASINPVETLFVVDAMTGQDAANTAKAFNEALPLTGVVLTKVDGDARGGAALSIRHITGKPIKFLGVGEKTEALEPFHPDRIASRILGMGDVLSLIEDIESKVDRAQAEKLASKLKKGDGFDLNDFLEQLRQMKNMGGMASLMGKLPGMGQIPDNVKSQMDDKVLVRMEAIINSMTMKERAKPEIIKGSRKRRIAAGCGMQVQDVNRLLKQFDDMQRMMKKMKKGGMAKMMRSMKGMMPPGFPGR

SEQ ID NO: 10264 - protein, 482 aa, Escherichia coli
MKLNDSNLFRQQALINGEWLDANNGEAIDVTNPANGDKLGSVPKMGADETRAAIDAANRALPAWRALTAKERATILRNWFNLMMEHQDDLARLMTLEQGKPLAEAKGEISYAASFIEWFAEEGKRIYGDTIPGHQADKRLIVIKQPIGVTAAITPWNFPAAMITRKAGPALAAGCTMVLKPASQTPFSALALAELAIRAGVPAGVFNVVTGSAGAVGNELTSNPLVRKLSFTGSTEIGRQLMEQCAKDIKKVSLELGGNAPFIVFDDADLDKAVEGALASKFRNAGQTCVCANRLYVQDGVYDRFAEKLQQAVSKLHIGDGLDNGVTIGPLIDEKAVAKVEEHIADALEKGARVVCGGKAHERGGNFFQPTILVDVPANAKVSKEETFGPLAPLFRFKDEADVIAQANDTEFGLAAYFYARDLSRVFRVGEALEYGIVGINTGIISNEVAPFGGIKASGLGREGSKYGIEDYLEIKYMCIGL

SEQ ID NO: 10265 - protein, 466 aa, Escherichia coli
MGQSSQPHELGGGLKSRHVTMLSIAGVIGASLFVGSSVAIAEAGPAVLLAYLFAGLLVVMIMRMLAEMAVATPDTGSFSTYADKAIGRWAGYTIGWLYWWFWVLVIPLEANIAAMILHSWVPGIPIWLFSLVITLALTGSNLLSVKNYGEFEFWLALCKVIAILAFIFLGAVAISGFYPYAEVSGISRLWDSGGFMPNGFGAVLSAMLITMFSFMGAEIVTIAAAESDTPEKHIVRATNSVIWRISIFYLCSIFVVVALIPWNMPGLKAVGSYRSVLELLNIPHAKLIMDCVILLSVTSCLNSALYTASRMLYSLSRRGDAPAVMGKINRSKTPYVAVLLSTGAAFLTVVVNYYAPAKVFKFLIDSSGAIALLVYLVIAVSQLRMRKILRAEGSEIRLRMWLYPWLTWLVIGFITFVLVVMLFRPAQQLEVISTGLLAIGIICTVPIMARWKKLVLWQKTPVHNTR

SEQ ID NO: 10266 - protein, 714 aa, Escherichia coli
MATTTAECLTQETMDYHALNAMLNLYDSAGRIQFDKDRQAVDAFIATHVRPNSVTFSSQQQRLNWLVNEGYYDESVLNRYSRDFVITLFTHAHTSGFRFQTFLGAWKFYTSYTLKTFDGKRYLEDFADRVTMVALTLAQGDETLALQLTDEMLSGRFQPATPTFLNCGKQQRGELVSCFLLRIEDNMESIGRAVNSALQLSKRGGGVAFLLSNLREAGAPIKRIENQSSGVIPVMKMLEDAFSYANQLGARQGAGAVYLHAHHPDILRFLDTKRENADEKIRIKTLSLGVVIPDITFHLAKENAQMALFSPYDVERVYGKPFADVAISQHYDELVADERIRKKYLNARDFFQRLAEIQFESGYPYIMYEDTVNRANPIAGRINMSNLCSEILQVNSASEYDENLDYTRTGHDISCNLGSLNIAHTMDSPDFARTVETAVRGLTAVSDMSHIRSVPSIEAGNAASHAIGLGQMNLHGYLAREGIAYGSPEALDFTNLYFYAITWHALRTSMLLARERGETFAGFKQSRYASGEYFSQYLQGNWQPKTAKVGELFTRSGITLPTREMWAQLRDDVMRYGIYNQNLQAVPPTGSISYINHATSSIHPIVAKVEIRKEGKTGRVYYPAPFMTNENLALYQDAYEIGAEKIIDTYAEATRHVDQGLSLTLFFPDTATTRDINKAQIYAWRKGIKTLYYIRLRQMALEGTEIEGCVSCAL

SEQ ID NO: 10267 - protein, 319 aa, Escherichia coli
MKLSRISAINWNKISDDKDLEVWNRLTSNFWLPEKVPLSNDIPAWQTLTVVEQQLTMRVFTGLTLLDTLQNVIGAPSLMPDALTPHEEAVLSNISFMEAVHARSYSSIFSTLCQTKDVDAAYAWSEENAPLQRKAQIIQQHYRGDDPLKKKIASVFLESFLFYSGFWLPMYFSSRGKLTNTADLIRLIIRDEAVHGYYIGYKYQKNMEKISLGQREELKSFAFDLLLELYDNELQYTDELYAETPWADDVKAFLCYNANKALMNLGYEPLFPAEMAEVNPAILAALSPNADENHDFFSGSGSSYVMGKAVETEDEDWNF

SEQ ID NO: 10268 - protein, 176 aa, Escherichia coli
MDSSFTPIEQMLKFRASRHEDFPYQEILLTRLCMHMQSKLLENRNKMLKAQGINETLFMALITLESQENHSIQPSELSCALGSSRTNATRIADELEKRGWIERRESDNDRRCLHLQLTEKGHEFLREVLPPQHNCLHQLWSALSTTEKDQLEQITRKLLSRLDQMEQDGVVLEAMS

SEQ ID NO: 10269 - protein, 876 aa, Escherichia coli
MSKSTAEIRQAFLDFFHSKGHQVVASSSLVPHNDPTLLFTNAGMNQFKDVFLGLDKRNYSRATTSQRCVRAGGKHNDLENVGYTARHHTFFEMLGNFSFGDYFKHDAIQFAWELLTSEKWFALPKERLWVTVYESDDEAYEIWEKEVGIPRERIIRIGDNKGAPYASDNFWQMGDTGPCGPCTEIFYDHGDHIWGGPPGSPEEDGDRYIEIWNIVFMQFNRQADGTMEPLPKPSVDTGMGLERIAAVLQHVNSNYDIDLFRTLIQAVAKVTGATDLSNKSLRVIADHIRSCAFLIADGVMPSNENRGYVLRRIIRRAVRHGNMLGAKETFFYKLVGPLIDVMGSAGEDLKRQQAQVEQVLKTEEEQFARTLERGLALLDEELAKLSGDTLDGETAFRLYDTYGFPVDLTADVCRERNIKVDEAGFEAAMEEQRRRAREASGFGADYNAMIRVDSASEFKGYDHLELNGKVTALFVDGKAVDAINAGQEAVVVLDQTPFYAESGGQVGDKGELKGANFSFAVEDTQKYGQAIGHIGKLAAGSLKVGDAVQADVDEARRARIRLNHSATHLMHAALRQVLGTHVSQKGSLVNDKVLRFDFSHNEAMKPEEIRAVEDLVNTQIRRNLPIETNIMDLEAAKAKGAMALFGEKYDERVRVLSMGDFSTELCGGTHASRTGDIGLFRIISESGTAAGVRRIEAVTGEGAIATVHADSDRLSEVAHLLKGDSNNLADKVRSVLERTRQLEKELQQLKEQAAAQESANLSSKAIDVNGVKLLVSELSGVEPKMLRTMVDDLKNQLGSTIIVLATVVEGKVSLIAGVSKDVTDRVKAGELIGMVAQQVGGKGGGRPDMAQAGGTDAAALPAALASVKGWVSAKLQ

SEQ ID NO: 10270 - protein, 474 aa, Escherichia coli
MSVFPESFLWGGALAANQSEGAFREGDKGLTTVDMIPHGEHRMAVKLGLEKRFQLRDDEFYPSHEATDFYHRYKEDIALMAEMGFKVFRTSIAWSRLFPQGDEITPNQQGIAFYRSVFEECKKYGIEPLVTLCHFDVPMHLVTEYGSWRNRKLVEFFSRYARTCFEAFDGLVKYWLTFNEINIMLHSPFSGAGLVFEEGENQDQVKYQAAHHQLVASALATKIAHEVNPQNQVGCMLAGGNFYPYSCKPEDVWAALEKDRENLFFIDVQARGTYPAYSARVFREKGVTINKAPGDDEILKNTVDFVSFSYYASRCASAEMNANNSSAANVVKSLRNPYLQVSDWGWGIDPLGLRITMNMMYDRYQKPLFLVENGLGAKDEFAANGEINDDYRISYLREHIRAMGEAIADGIPLMGYTTWGCIDLVSASTGEMSKRYGFVFVDRDDAGNGTLTRTRKKSFWWYKKVIASNGEDLE

SEQ ID NO: 10271 - protein, 290 aa, Escherichia coli
MCTTCGCGEGNLYIEGDEHNPHSAFRSAPFAPAARPKMKITGIKAPEFTPSQTEEGDLHYGHGEAGTHAPGMSQRRMLEVEIDVLDKNNRLAERNRARFAARKQLVLNLVSSPGSGKTTLLTETLMRLKDSVPCAVIEGDQQTVNDAARIRATGTPAIQVNTGKGCHLDAQMIADAAPRLPLDDNGILFIENVGNLVCPASFDLGEKHKVAVLSVTEGEDKPLKYPHMFAAASLMLLNKVDLLPYLNFDVEKCIACAREVNPEIEIILISATSGEGMDQWLNWLETQRCA

SEQ ID NO: 10272 - protein, 853 aa, Escherichia coli
MSAIENFDAHTPMMQQYLRLKAQHPEILLFYRMGDFYELFYDDAKRASQLLDISLTKRGASAGEPIPMAGIPYHAVENYLAKLVNQGESVAICEQIGDPATSKGPVERKVVRIVTPGTISDEALLQERQDNLLAAIWQDSKGFGYATLDISSGRFRLSEPADRETMAAELQRTNPAELLYAEDFAEMSLIEGRRGLRRRPLWEFEIDTARQQLNLQFGTRDLVGFGVENAPRGLCAAGCLLQYAKDTQRTTLPHIRSITMEREQDSIIMDAATRRNLEITQNLAGGAENTLASVLDCTVTPMGSRMLKRWLHMPVRDTRVLLERQQTIGALQDFTAGLQPVLRQVGDLERILARLALRTARPRDLARMRHAFQQLPELRAQLETVDSAPVQALREKMGEFAELRDLLERAIIDTPPVLVRDGGVIASGYNEELDEWRALADGATDYLERLEVRERERTGLDTLKVGFNAVHGYYIQISRGQSHLAPINYMRRQTLKNAERYIIPELKEYEDKVLTSKGKALALEKQLYEELFDLLLPHLEALQQSASALAELDVLVNLAERAYTLNYTCPTFIDKPGIRITEGRHPVVEQVLNEPFIANPLNLSPQRRMLIITGPNMGGKSTYMRQTALIALMAYIGSYVPAQKVEIGPIDRIFTRVGAADDLASGRSTFMVEMTETANILHNATEYSLVLMDEIGRGTSTYDGLSLAWACAENLANKIKALTLFATHYFELTQLPEKMEGVANVHLDALEHGDTIAFMHSVQDGAASKSYGLAVAALAGVPKEVIKRARQKLRELESISPNAAATQVDGTQMSLLSVPEETSPAVEALENLDPDSLTPRQALEWIYRLKSLV

SEQ ID NO: 10273 - protein, 236 aa, Escherichia coli
MATTHLDVCAVVPAAGFGRRMQTECPKQYLSIGNQTILEHSVHALLAHPRVKRVVIAISPGDSRFAQLPLANHPQITVVDGGDERADSVLAGLKAAGDAQWVLVHDAARPCLHQDDLARLLALSETSRTGGILAAPVRDTMKRAEPGKNAIAHTVDRNGLWHALTPQFFPRELLHDCLTRALNEGATITDEASALEYCGFHPQLVEGRADNIKVTRPEDLALAEFYLTRTIHQENT

SEQ ID NO: 10274 - protein, 432 aa, Escherichia coli
MSKIVKIIGREIIDSRGNPTVEAEVHLEGGFVGMAAAPSGASTGSREALELRDGDKSRFLGKGVTKAVAAVNGPIAQALIGKDAKDQAGIDKIMIDLDGTENKSKFGANAILAVSLANAKAAAAAKGMPLYEHIAELNGTPGKYSMPVPMMNIINGGEHADNNVDIQEFMIQPVGAKTVKEAIRMGSEVFHHLAKVLKAKGMNTAVGDEGGYAPNLGSNAEALAVIAEAVKAAGYELGKDITLAMDCAASEFYKDGKYVLAGEGNKAFTSEEFTHFLEELTKQYPIVSIEDGLDESDWDGFAYQTKVLGDKIQLVGDDLFVTNTKILKEGIEKGIANSILIKFNQIGSLTETLAAIKMAKDAGYTAVISHRSGETEDATIADLAVGTAAGQIKTGSMSRSDRVAKYNQLIRIEEALGEKAPYNGRKEIKGQA

SEQ ID NO: 10275 - protein, 545 aa, Escherichia coli
MTTNYIFVTGGVVSSLGKGIAAASLAAILEARGLNVTIMKLDPYINVDPGTMSPIQHGEVFVTEDGAETDLDLGHYERFIRTKMSRRNNFTTGRIYSDVLRKERRGDYLGATVQVIPHITNAIKERVLEGGEGHDVVLVEIGGTVGDIESLPFLEAIRQMAVEIGREHTLFMHLTLVPYMAASGEVKTKPTQHSVKELLSIGIQPDILICRSDRAVPANERAKIALFCNVPEKAVISLKDVDSIYKIPGLLKSQGLDDYICKRFSLNCPEANLSEWEQVIFEEANPVSEVTIGMVGKYIELPDAYKSVIEALKHGGLKNRVSVNIKLIDSQDVETRGVEILKGLDAILVPGGFGYRGVEGMITTARFARENNIPYLGICLGMQVALIDYARHVANMENANSTEFVPDCKYPVVALITEWRDENGNVEVRSEKSDLGGTMRLGAQQCQLVDDSLVRQLYNAPTIVERHRHRYEVNNMLLKQIEDAGLRVAGRSGDDQLVEIIEVPNHPWFVACQFHPEFTSTPRDGHPLFAGFVKAASEFQKRQAK

SEQ ID NO: 10276 - protein, 744 aa, Escherichia coli
MVAVRSAHINKAGEFDPEKWIASLGITSQKSCECLAETWAYCLQQTQGHPDASLLLWRGVEMVEILSTLSMDIDTLRAALLFPLADANVVSEDVLRESVGKSVVNLIHGVRDMAAIRQLKATHTDSVSSEQVDNVRRMLLAMVDDFRCVVIKLAERIAHLREVKDAPEDERVLAAKECTNIYAPLANRLGIGQLKWELEDYCFRYLHPTEYKRIAKLLHERRLDREHYIEEFVGHLRAEMKAEGVKAEVYGRPKHIYSIWRKMQKKNLAFDELFDVRAVRIVAERLQDCYAALGIVHTHYRHLPDEFDDYVANPKPNGYQSIHTVVLGPGGKTVEIQIRTKQMHEDAELGVAAHWKYKEGAAAGGARSGHEDRIAWLRKLIAWQEEMADSGEMLDEVRSQVFDDRVYVFTPKGDVVDLPAGSTPLDFAYHIHSDVGHRCIGAKIGGRIVPFTYQLQMGDQIEIITQKQPNPSRDWLNPNLGYVTTSRGRSKIHAWFRKQDRDKNILAGRQILDDELEHLGISLKEAEKHLLPRYNFNDVDELLAAIGGGDIRLNQMVNFLQSQFNKPSAEEQDAAALKQLQQKSYTPQNRSKDNGRVVVEGVGNLMHHIARCCQPIPGDEIVGFITQGRGISVHRADCEQLAELRSHAPERIVDAVWGESYSAGYSLVVRVVANDRSGLLRDITTILANEKVNVLGVASRSDTKQQLATIDMTIEIYNLQVLGRVLGKLNQVPDVIDARRLHGS

SEQ ID NO: 10277 - protein, 305 aa, Escherichia coli
MSKRLPPLNALRVFDAAARHLSFTRAAEELFVTQAAVSHQIKSLEDFLGLKLFRRRNRSLLLTEEGQSYFLDIKEIFSQLTEATRKLQARSAKGALTVSLLPSFAIHWLVPRLSSFNSAYPGIDVRIQAVDRQEDKLADDVDVAIFYGRGNWPGLRVEKLYAEYLLPVCSPLLLTGEKPLKTPEDLAKHTLLHDASRRDWQTYTRQLGLNHINVQQGPIFSHSAMVLQAAIHGQGVALANNVMAQSEIEAGRLVCPFNDVLVSKNAFYLVCHDSQAELGKIAAFRQWILAKAAAEQEKFRFRYEQ

SEQ ID NO: 10278 - protein, 748 aa, Escherichia coli
MLTRLREIVEKVASAPRLNEALNILVTDICLAMDTEVCSVYLADHDRRCYYLMATRGLKKPRGRTVTLAFDEGIVGLVGRLAEPINLADAQKHPSFKYIPSVKEERFRAFLGVPIIQRRQLLGVLVVQQRELRQYDESEESFLVTLATQMAAILSQSQLTALFGQYRQTRIRALPAAPGVAIAEGWQDATLPLMEQVYQASTLDPALERERLTGALEEAANEFRRYSKRFAAGAQKETAAIFDLYSHLLSDTRLRRELFAEVDKGSVAEWAVKTVIEKFAEQFAALSDNYLKERAGDLRALGQRLLFHLDDANQGPNAWPERFILVADELSATTLAELPQDRLVGVVVRDGAANSHAAIMVRALGIPTVMGADIQPSVLHRRTLIVDGYRGELLVDPEPVLLQEYQRLISEEIELSRLAEDDVNLPAQLKSGERIKVMLNAGLSPEHEEKLGSRIDGIGLYRTEIPFMLQSGFPSEEEQVAQYQGMLQMFNDKPVTLRTLDVGADKQLPYMPISEENPCLGWRGIRITLDQPEIFLIQVRAMLRANAATGNLNILLPMVTSLDEVDEARRLIERAGREVEEMIGYEIPKPRIGIMLEVPSMVFMLPHLAKRVDFISVGTNDLTQYILAVDRNNTRVANIYDSLHPAMLRALAMIAREAEIHGIDLRLCGEMAGDPMCVAILIGLGYRHLSMNGRSVARAKYLLRRIDYAEAENLAQRSLEAQLATEVRHQVAAFMERRGMGGLIRGGL

SEQ ID NO: 10279 - protein, 253 aa, Escherichia coli
MILSAFSLEGKVAVVTGCDTGLGQGMALGLAQAGCDIVGINIVEPTETIEQVTALGRRFLSLTADLRKIDGIPALLDRAVAEFGHIDILVNNAGLIRREDALEFSEKDWDDVMNLNIKSVFFMSQAAAKHFIAQGNGGKIINIASMLSFQGGIRVPSYTASKSGVMGVTRLMANEWAKHNINVNAIAPGYMATNNTQQLRADEQRSAEILDRIPAGRWGLPSDLMGPIVFLASSASDYVNGYTIAVDGGWLAR

SEQ ID NO: 10280 - protein, 394 aa, Escherichia coli
MMKDVVIVGALRTPIGCFRGALAGHSAVELGSLVVKALIERTGVPAYAVDEVILGQVLTAGAGQNPARQSAIKGGLPNSVSAITINDVCGSGLKALHLATQAIQCGEADIVIAGGQENMSRAPHVLTDSRTGAQLGNSQLVDSLVHDGLWDAFNDYHIGVTAENLAREYGISRQLQDAYALSSQQKARAAIDAGRFKDEIVPVMTQSNGQTLVVDTDEQPRTDASAEGLARLNPSFDSLGSVTAGNASSINDGAAAVMMMSEAKARALNLPVLARIRAFASVGVDPALMGIAPVYATRRCLERVGWQLAEVDLIEANEAFAAQALSVGKMLEWDERRVNVNGGAIALGHPIGASGCRILVSLVHEMVKRNARKGLATLCIGGGQGVALTIERDE

SEQ ID NO: 10281 - protein, 752 aa, Escherichia coli
MRVDAIAKVTGRARYTDDYVMAGMCYAKYVRSPIAHGYAVSINDEQARSLPGVLAIFTWEDVPDIPFATAGHAWTLDENKRDTADRALLTRHVRHHGDAVAIVVARDELTAEKAAQLVSIEWQELPVITTPEAALAEDAAPIHNGGNLLKQSTMSTGNVQQTIDAADYQVQGHYQTPVIQHCHMESVTSLAWMEDDSRITIVSSTQIPHIVRRVVGQALDIPWSCVRVIKPFVGGGFGNKQDVLEEPMAAFLTSKLGGIPVKVSLSREECFLATRTRHAFTIDGQMGVNRDGTLKGYSLDVLSNTGAYASHGHSIASAGGNKVAYLYPRCAYAYSSKTCYTNLPSAGAMRGYGAPQVVFAVESMLDDAATALGIDPVEIRLRNAAREGDANPLTGKRIYSAGLPECLEKGRKIFEWEKRRAECQNQQGNLRRGVGVACFSYTSNTWPVGVEIAGARLLMNQDGTINVQSGATEIGQGADTVFSQMVAETVGVPVSDVRVISTQDTDVTPFDPGAFASRQSYVAAPALRSAALLLKEKIIAHAAVMLHQSAMNLTLIKGHIVLVERPEEPLMSLKDLAMDAFYHPERGGQLSAESSIKTTTNPPAFGCTFVDLTVDIALCKVTINRILNVHDSGHILNPLLAEGQVHGGMGMGIGWALFEEMIIDAKSGVVRNPNLLDYKMPTMPDLPQLESAFVEINEPQSAYGHKSLGEPPIIPVAAAIRNAVKMATGVAINTLPLTPKRLYEEFHLAGLI

SEQ ID NO: 10282 - protein, 403 aa, Escherichia coli
MAKNIPFKLILEKAKDYQADMTRFLRDMVAIPSESCDEKRVVHRIKEEMEKVGFDKVEIDPMGNVLGYIGHGPRLVAMDAHIDTVGIGNIKNWDFDPYEGMETDELIGGRGTSDQEGGMASMVYAGKIIKDLGLEDEYTLLVTGTVQEEDCDGLCWQYIIEQSGIRPEFVVSTEPTDCQVYRGQRGRMEIRIDVQGVSCHGSAPERGDNAIFKMGPILGELQELSQRLGYDEFLGKGTLTVSEIFFTSPSRCAVADSCAVSIDRRLTWGETWEGALDEIRALPAVQKANAVVSMYNYDRPSWTGLVYPTECYFPTWKVEEDHFTVKALVNAYEGLFGKAPVVDKWTFSTNGVSIMGRHGIPVIGFGPGKEPEAHAPNEKTWKSHLVTCAAMYAAIPLSWLATE

SEQ ID NO: 10283 - protein, 310 aa, Escherichia coli
MSKKIVLALGGNALGDDLAGQMKAVKITSQAIVDLIAQGHEVIVTHGNGPQVGMINQAFEAAAKTEAHSPMLPMSVCVALSQGYIGYDLQNALREELLSRGINKPVATLVTQVEVDANDPAFLNPTKPIGSFFTEQEAEQLTKQGYTLKEDAGRGYRRVVASPKPVDIIEKETVKALVDAGQVVITVGGGGIPVIREGNHLRGASAVIDKDWASARLAEMIDADMLIILTAVEKVAINFGKENEQWLDRLSLSDAERFIEEGHFAKGSMLPKVEAAASFARSRAGREALITVLSKAKEGIEGKTGTVICQ

SEQ ID NO: 10284 - protein, 439 aa, Escherichia coli
MMSGEHTLKAVRGSFIDVTRTIDNPEEIASALRFIEDGLLLIKQGKVEWFGEWENGKHQIPDTIRVRDYRGKLIVPGFVDTHIHYPQSEMVGAYGEQLLEWLNKHTFPTERRYEDLEYAREMSAFFIKQLLRNGTTTALVFGTVHPQSVDALFEAASHINMRMIAGKVMMDRNAPDYLLDTAESSYHQSKELIERWHKNGRLLYAITPRFAPTSSPEQMAMAQRLKEEYPDTWVHTHLCENKDEIAWVKSLYPDHDGYLDVYHQYGLTGKNCVFAHCVHLEEKEWDRLSETKSSIAFCPTSNLYLGSGLFNLKKAWQKKVKVGMGTDIGAGTTFNMLQTLNEAYKVLQLQGYRLSAYEAFYLATLGGAKSLGLDDLIGNFLPGKEADFVVMEPTATPLQQLRYDNSVSLVDKLFVMMTLGDDRSIYRTYVDGRLVYERN

SEQ ID NO: 10285 - protein, 505 aa, Escherichia coli
MSEQHAQGADAVVDLNNELKTRREKLANLREQGIAFPNDFRRDHTSDQLHAEFDGKENEELEALNIEVAVAGRMMTRRIMGKASFVTLQDVGGRIQLYVARDDLPEGVYNEQFKKWDLGDILGAKGKLFKTKTGELSIHCTELRLLTKALRPLPDKFHGLQDQEARYRQRYLDLISNDESRNTFKVRSQILSGIRQFMVNRGFMEVETPMMQVIPGGAAARPFITHHNALDLDMYLRIAPELYLKRLVVGGFERVFEINRNFRNEGISVRHNPEFTMMELYMAYADYKDLIELTESLFRTLAQDILGKTEVTYGDVTLDFGKPFEKLTMREAIKKYRPETDMADLDNFDSAKAIAESIGIHVEKSWGLGRIVTEIFEEVAEAHLIQPTFITEYPAEVSPLARRNDVNPEITDRFEFFIGGREIGNGFSELNDAEDQAQRFLDQVAAKDAGDDEAMFYDEDYVTALEHGLPPTAGLGIGIDRMVMLFTNSHTIRDVILFPAMRPVK

SEQ ID NO: 10286 - protein, 577 aa, Escherichia coli
MKQQIQLRRREVDETADLPAELPPLLRRLYASRGVRSAQELERSVKGMLPWQQLSGVEKAVEILYNAFREGTRIIVVGDFDADGATSTALSVLAMRSLGCSNIDYLVPNRFEDGYGLSPEVVDQAHARGAQLIVTVDNGISSHAGVEHARSLGIPVIVTDHHLPGDTLPAAEAIINPNLRDCNFPSKSLAGVGVAFYLMLALRTFLRDQGWFDERNIAIPNLAELLDLVALGTVADVVPLDANNRILTWQGMSRIRAGKCRPGIKALLEVANRDAQKLAASDLGFALGPRLNAAGRLDDMSVGVALLLCDNIGEARVLANELDALNQTRKEIEQGMQIEALTLCEKLERSRDTLPGGLAMYHPEWHQGVVGILASRIKERFHRPVIAFAPAGDGTLKGSGRSIQGLHMRDALERLDTLYPGMMLKFGGHAMAAGLSLEEDKFKLFQQRFGELVTEWLDPSLLQGEVVSDGPLSPAEMTMEVAQLLRDAGPWGQMFPEPLFDGHFRLLQQRLVGERHLKVMVEPVGGGPLLDGIAFNVDTALWPDNGVREVQLAYKLDINEFRGNRSLQIIIDNIWPI

SEQ ID NO: 10287 - protein, 298 aa, Escherichia coli
MKQDLARIEQFLDALWLEKNLAENTLNAYRRDLSMMVEWLHHRGLTLATAQSDDLQALLAERLEGGYKATSSARLLSAVRRLFQYLYREKFREDDPSAHLASPKLPQRLPKDLSEAQVERLLQAPLIDQPLELRDKAMLEVLYATGLRVSELVGLTMSDISLRQGVVRVIGKGNKERLVPLGEEAVYWLETYLEHGRPWLLNGVSIDVLFPSQRAQQMTRQTFWHRIKHYAVLAGIDSEKLSPHVLRHAFATHLLNHGADLRVVQMLLGHSDLSTTQIYTHVATERLRQLHQQHHPRA

SEQ ID NO: 10288 - protein, 479 aa, Escherichia coli
MIVKKLTLPKDFLWGGAVAAHQVEGGWNKGGKGPSICDVLTGGAHGVPREITKEVLPGKYYPNHEAVDFYGHYKEDIKLFAEMGFKCFRTSIAWTRIFPKGDEAQPNEEGLKFYDDMFDELLKYNIEPVITLSHFEMPLHLVQQYGSWTNRKVVDFFVRFAEVVFERYKHKVKYWMTFNEINNQRNWRAPLFGYCCSGVVYTEHENPEETMYQVLHHQFVASALAVKAARRINPEMKVGCMLAMVPLYPYSCNPDDVMFAQESMRERYVFTDVQLRGYYPSYVLNEWERRGFNIKMEDGDLDVLREGTCDYLGFSYYMTNAVKAEGGTGDAISGFEGSVPNPYVKASDWGWQIDPVGLRYALCELYERYQRPLFIVENGFGAYDKVEEDGSINDDYRIDYLRAHIEEMKKAVTYDGVDLMGYTPWGCIDCVSFTTGQYSKRYGFIYVNKHDDGTGDMSRSRKKSFNWYKEVIASNGEKL

SEQ ID NO: 10289 - protein, 129 aa, Escherichia coli
MSNVPAELKYSKEHEWLRKEADGTYTVGITEHAQELLGDMVFVDLPEVGATVSAGDDCAVAESVKAASDIYAPVSGEIVAVNDALSDSPELVNSEPYAGGWIFKIKASDESELESLLDATAYEALLEDE

SEQ ID NO: 10290 - protein, 364 aa, Escherichia coli
MAQQTPLYEQHTLCGARMVDFHGWMMPLHYGSQIDEHHAVRTDAGMFDVSHMTIVDLRGSRTREFLRYLLANDVAKLTKSGKALYSGMLNASGGVIDDLIVYYFTEDFFRLVVNSATREKDLSWITQHAEPFGIEITVRDDLSMIAVQGPNAQAKAATLFNDAQRQAVEGMKPFFGVQAGDLFIATTGYTGEAGYEIALPNEKAADFWRALVEAGVKPCGLGARDTLRLEAGMNLYGQEMDETISPLAANMGWTIAWEPADRDFIGREALEVQREHGTEKLVGLVMTEKGVLRNELPVRFTDAQGNQHEGIITSGTFSPTLGYSIALARVPEGIGETAIVQIRNREMPVKVTKPVFVRNGKAVA

SEQ ID NO: 10291 - protein, 410 aa, Escherichia coli
MAKVSLEKDKIKFLLVEGVHQKALESLRAAGYTNIEFHKGALDDEQLKESIRDAHFIGLRSRTHLTEDVINAAEKLVAIGCFCIGTNQVDLDAAAKRGIPVFNAPFSNTRSVAELVIGELLLLLRGVPEANAKAHRGVWNKLAAGSFEARGKKLGIIGYGHIGTQLGILAESLGMYVYFYDIENKLPLGNATQVQHLSDLLNMSDVVSLHVPENPSTKNMMGAKEISLMKPGSLLINASRGTVVDIPALCDALASKHLAGAAIDVFPTEPATNSDPFTSPLCEFDNVLLTPHIGGSTQEAQENIGLEVAGKLIKYSDNGSTLSAVNFPEVSLPLHGGRRLMHIHENRPGVLTALNKIFAEQGVNIAAQYLQTSAQMGYVVIDIEADEDVAEKALQAMKAIPGTIRARLLY

SEQ ID NO: 10292 - protein, 297 aa, Escherichia coli
MKRPDYRTLQALDAVIRERGFERAAQKLCITQSAVSQRIKQLENMFGQPLLVRTVPPRPTEQGQKLLALLRQVELLEEEWLGDEQTGSTPLLLSLAVNADSLATWLLPALAPVLADSPIRLNLQVEDETRTQERLRRGEVVGAVSIQHQALPSCLVDKLGALDYLFVSSKPFAEKYFPNGVTRSALLKAPVVAFDHLDDMHQAFLQQNFDLPPGSVPCHIVNSSEAFVQLARQGTTCCMIPHLQIEKELASGELIDLTPGLFQRRMLYWHRFAPESRMMRKVTDALLDYGHKVLRQD

SEQ ID NO: 10293 - protein, 387 aa, Escherichia coli
MSVIKMTDLDLAGKRVFIRADLNVPVKDGKVTSDARIRASLPTIELALKQGAKVMVTSHLGRPTEGEYNEEFSLLPVVNYLKDKLSNPVRLVKDYLDGVDVAEGELVVLENVRFNKGEKKDDETLSKKYAALCDVFVMDAFGTAHRAQASTHGIGKFADVACAGPLLAAELDALGKALKEPARPMVAIVGGSKVSTKLTVLDSLSKIADQLIVGGGIANTFIAAQGHDVGKSLYEADLVDEAKRLLTTCNIPVPSDVRVATEFSETAPATLKSVNDVKADEQILDIGDASAQELAEILKNAKTILWNGPVGVFEFPNFRKGTEIVANAIADSEAFSIAGGGDTLAAIDLFGIADKISYISTGGGAFLEFVEGKVLPAVAMLEERAKK

SEQ ID NO: 10294 - protein, 147 aa, Escherichia coli
MRLSDYFPESSISVIHSAKDWQEAIDFSMVSLLDKNYISENYIQAIKDSTINNGPYYILAPGVAMPHARPECGALKTGMSLTLLEQGVYFPGNDEPIKLLIGLSAADADSHIGAIQALSELLCEEEILEQLLTASSEKQLADIISRG

SEQ ID NO: 10295 - protein, 384 aa, Escherichia coli
MAKHLFTSESVSEGHPDKIADQISDAVLDAILEQDPKARVACETYVKTGMVLVGGEITTSAWVDIEEITRNTVREIGYVHSDMGFDANSCAVLSAIGKQSPDINQGVDRADPLEQGAGDQGLMFGYATNETDVLMPAPITYAHRLVQRQAEVRKNGTLPWLRPDAKSQVTFQYDDGKIVGIDAVVLSTQHSEEIDQKSLQEAVMEEIIKPILPAEWLTSATKFFINPTGRFVIGGPMGDCGLTGRKIIVDTYGGMARHGGGAFSGKDPSKVDRSAAYAARYVAKNIVAAGLADRCEIQVSYAIGVAEPTSIMVETFGTEKVPSEQLTLLVREFFDLRPYGLIQMLDLLHPIYKETAAYGHFGREHFPWEKTDKAQLLRDAAGLK

SEQ ID NO: 10296 - protein, 252 aa, Escherichia coli
MGRRRGFLTMRIPRIYHPEPLTSHSHIALCEDAANHIGRVLRMGPGQALQLFDGSNQVFDAEITSASKKSVEVKVLEGQIDDRESPLHIHLGQVMSRGEKMEFTIQKSIELGVSLITPLFSERCGVKLDSERLNKKLQQWQKIAIAACEQCGRNRVPEIRPAMDLEAWCAEQDEGLKLNLHPRASNSINTLPLPVERVRLLIGPEGGLSADEIAMTARYQFTDILLGPRVLRTETTALTAITALQVRFGDLG

SEQ ID NO: 10297 - protein, 234 aa, Escherichia coli
MNDIAHNLAQVRDKISAAATRCGRSPEEITLLAVSKTKPASAIAEAIDAGQRQFGENYVQEGVDKIRHFQELGVTGLEWHFIGPLQSNKSRLVAEHFDWCHTIDRLRIATRLNDQRPAELPPLNVLIQINISDENSKSGIQLAELDELAAAVAELPRLRLRGLMAIPAPESEYVRQFEVARQMAVAFAGLKTRYPHIDTLSLGMSDDMEAAIAAGSTMVRIGTAIFGARDYSKK

SEQ ID NO: 10298 - protein, 197 aa, Escherichia coli
MQKVVLATGNVGKVRELASLLSDFGLDIVAQTDLGVDSAEETGLTFIENAILKARHAAKVTALPAIADDSGLAVDVLGGAPGIYSARYSGEDATDQKNLQKLLETMKDVPDDQRQARFHCVLVYLRHAEDPTPLVCHGSWPGVITREPAGTGGFGYDPIFFVPSEGKTAAELTREEKSAISHRGQALKLLLDALRNG

SEQ ID NO: 10299 - protein, 294 aa, Escherichia coli
MSHLKDPTTQYYTGEYPKQKQPTPGIQAKMTPVPDCGEKTYVGSGRLKDRKALVTGGDSGIGRAAAIAYAREGADVAISYLPVEEEDAQDVKKIIEECGRKAVLLPGDLSDEKFARSLVHEAHKALGGLDIMALVAGKQVAIPDIADLTSEQFQKTFAINVFALFWLTQEAIPLLPKGASIITTSSIQAYQPSPHLLDYAATKAAILNYSRGLAKQVAEKGIRVNIVAPGPIWTALQISGGQTQDKIPQFGQQTPMKRAGQPAELAPVYVYLASQESSYVTAEVHGVCGGEHLG

SEQ ID NO: 10300 - protein, 236 aa, Escherichia coli
MGYRSIDTAAAYKNEEGVGKALKNASVNREELFITTKLWNDDHKRPREALLDSLKKLQLDYIDLYLMHWPVPAIDHYVEAWKGMIELQKEGLIKSIGVCNFQIHHLQRLIDETGVTPVINQIELHPLMQQRQLHAWNATHKIQTESWSPLAQGGKGVFDQKVIRDLADKYGKTPAQIVIRWHLDSGLVVIPKSVTPSRIAENFDVWDFRLDKDELGEIAKLDQGKRLGPDPDQFGG

SEQ ID NO: 10301 - protein, 477 aa, Escherichia coli
MKVTLPEFERAGVMVVGDVMLDRYWYGPTSRISPEAPVPVVKVNTIEERPGGAANVAMNIASLGANARLVGLTGIDDAARALSKSLADVNVKCDFVSVPTHPTITKLRVLSRNQQLIRLDFEEGFEGVDPQPLHERINQALSSIGALVLSDYAKGALASVQQMIQLARKAGVPVLIDPKGTDFERYRGATLLTPNLSEFEAVVGKCKTEEEIVERGMKLIADYELSALLVTRSEQGMSLLQPGKAPLHMPTQAQEVYDVTGAGDTVIGVLAATLAAGNSLEEACFFANAAAGVVVGKLGTSTVSPIELENAVRGRADTGFGVMTEEELKLAVAAARKRGEKVVMTNGVFDILHAGHVSYLANARKLGDRLIVAVNSDASTKRLKGDSRPVNPLEQRMIVLGALEAVDWVVSFEEDTPQRLIAGILPDLLVKGGDYKPEEIAGSKEVWANGGEVLVLNFEDGCSTTNIIKKIQQDKKG

SEQ ID NO: 10302 - protein, 433 aa, Escherichia coli [sequence omitted]

SEQ ID NO: 10303 - protein, 205 aa, Escherichia coli
MSAIAPGMILIAYLCGSISSAILVCRLCGLPDPRTSGSGNPGATNVLRIGGKGAAVAVLIFDVLKGMLPVWGAYELGVSPFWLGLIAIAACLGHIWPVFFGFKGGKGVATAFGAIAPIGWDLTGVMAGTWLLTVLLSGYSSLGAIVSALIAPFYVWWFKPQFTFPVSMLSCLILLRHHDNIQRLWRRQETKIWTKFKRKREKDPE

SEQ ID NO: 10304 - protein, 337 aa, Escherichia coli
MRVLGIETSCDETGIAIYDDEKGLLANQLYSQVKLHADYGGVVPELASRDHVRKTVPLIQAALKESGLTAKDIDAVAYTAGPGLVGALLVGATVGRSLAFAWDVPAIPVHHMEGHLLAPMLEDNPPEFPFVALLVSGGHTQLISVTGIGQYELLGESIDDAAGEAFDKTAKLLGLDYPGGPLLSKMAAQGTAGRFVFPRPMTDRPGLDFSFSGLKTFAANTIRDNGTDDQTRADIARAFEDAVVDTLMIKCKRALDQTGFKRLVMAGGVSANRTLRAKLAEMMKKRRGEVFYARPEFCTDNGAMIAYAGMVRFKAGATADLGVSVRPRWPLAELPAA

SEQ ID NO: 10305 - protein, 71 aa, Escherichia coli
MPVIKVRENEPFDVALRRFKRSCEKAGVLAEVRRREFYEKPTTERKRAKASAVKRHAKKLARENARRTRLY

SEQ ID NO: 10306 - protein, 672 aa, Escherichia coli
MSYPSLFAPLDLGFTTLKNRVLMGSMHTGLEEYPDGAERLAAFYAERARHGVALIVSGGIAPDLTGVGMEGGAMLNDASQIPHHRTITEAVHQEGGKIALQILHTGRYSYQPHLVAPSALQAPINRFVPHELSHEEILQLIDNFARCAQLAREAGYDGVEVMGSEGYLINEFLTLRTNQRSDQWGGDYRNRMRFAVEVVRAVRERVGNDFIIIYRLSMLDLVEDGGTFAETVELAQAIEAAGATIINTGIGWHEARIPTIATPVPRGAFSWVTRKLKGHVSLPLVTTNRINDPQVADDILSRGDADMVSMARPFLADAELLSKAQSGRADEINTCIGCNQACLDQIFVGKVTSCLVNPRACHETKMPILPAVQKKNLAVVGAGPAGLAFAINAAARGHQVTLFDAHSEIGGQFNIAKQIPGKEEFYETLRYYRRMIEVTGVTLKLNHTVTADQLQAFDETILASGIVPRTPPIDGIDHPKVLSYLDVLRDKAPVGNKVAIIGCGGIGFDTAMYLSQPGESTSQNIAGFCNEWGIDSSLQQAGGLSPQGMQIPRSPRQIVMLQRKASKPGQGLGKTTGWIHRTTLLSRGVKMIPGVSYQKIDDDGLHVVINGETQVLAVDNVVICAGQEPNRALAQPLIDSGKTVHLIGGCDVAMELDARRAIAQGTRLALEI

SEQ ID NO: 10307 - protein, 134 aa, Escherichia coli
MADTHHAQGPGKSVLGIGQRIVSIMVEMVETRLRLAVVELEEEKANLFQLLLMLGLTMLFAAFGLMSLMVLIIWAVDPQYRLNAMIATTVVLLLLALIGGIWTLRKSRKSTLLRHTRHELANDRQLLEEESREQ

SEQ ID NO: 10308 - protein, 256 aa, Escherichia coli [sequence omitted]

SEQ ID NO: 10309 - protein, 286 aa, Escherichia coli
MKQHQSADNSQGQLYIVPTPIGNLADITQRALEVLQAVDLIAAEDTRHTGLLLQHFGINARLFALHDHNEQQKAETLLAKLQEGQNIALVSDAGTPLINDPGYHLVRTCREAGIRVVPLPGPCAAITALSAAGLPSDRFCYEGFLPAKSKGRRDALKAIEAEPRTLIFYESTHRLLDSLEDIVAVLGESRYVVLARELTKTWETIHGAPVGELLAWVKEDENRRKGEMVLIVEGHKAQEEDLPADALRTLALLQAELPLKKAAALAAEIHGVKKNALYKYALEQQG

SEQ ID NO: 10310 - protein, 335 aa, Escherichia coli
MTDKTIAFSLLDLAPIPEGSSAREAFSHSLDLARLAEKRGYHRYWLAEHHNMTGIASAATSVLIGYLAANTTTLHLGSGGVMLPNHSPLVIAEQFGTLNTLYPGRIDLGLGRAPGSDQRTMMALRRHMSGDIDNFPRDVAELVDWFDARDPNPHVRPVPGYGEKIPVWLLGSSLYSAQLAAQLGLPFAFASHFAPDMLFQALHLYRSNFKPSARLEKPYAMVCINIIAADSNRDAEFLFTSMQQAFVKLRRGETGQLPPPIQNMDQFWSPSEQYGVQQALSMSLVGDKAKVRHGLQSILRETDADEIMVNGQIFDHQARLHSFELAMDVKEELLG

SEQ ID NO: 10311 - protein, 646 aa, Escherichia coli
MMSYVDWPPLILRHTYYMAEFETTFADLGLKAPILEALNDLGYEKPSPIQAECIPHLLNGRDVLGMAQTGSGKTAAFSLPLLQNLDPELKAPQILVLAPTRELAVQVAEAMTDFSKHMRGVNVVALYGGQRYDVQLRALRQGPQIVVGTPGRLLDHLKRGTLDLSKLSGLVLDEADEMLRMGFIEDVETIMAQIPEGHQTALFSATMPEAIRRITRRFMKEPQEVRIQSSVTTRPDISQSYWTVWGMRKNEALVRFLEAEDFDAAIIFVRTKNATLEVAEALERNGYNSAALNGDMNQALREQTLERLKDGRLDILIATDVAARGLDVERISLVVNYDIPMDSESYVHRIGRTGRAGRAGRALLFVENRERRLLRNIERTMKLTIPEVELPNAELLGKRRLEKFAAKVQQQLESSDLDQYRALLSKIQPTAEGEELDLETLAAALLKMAQGERTLIVPPDAPMRPKREFRDRDDRGPRDRNDRGPRGDREDRPRRERRDVGDMQLYRIEVGRDDGVEVRHIVGAIANEGDISSRYIGNIKLFASHSTIELPKGMPGEVLQHFTRTRILNKPMNMQLLGDAQPHTGGERRGGGRGFGGERREGGRNFSGERREGGRGDGRRFSGERREGRAPRRDDSTGRRRFGGDA

SEQ ID NO: 10312 - protein, 734 aa, Escherichia coli
MRRRSGINTSAVRYCLRKRKDITLLNPIVRKFQYGQHTVTLETGMMARQATAAVMVSMDDTAVFVTVVGQKKAKPGQDFFPLTVNYQERTYAAGRIPGSFFRREGRPSEGETLIARLIDRPIRPLFPEGFVNEVQVIATVVSVNPQVNPDIVAMIGASAALSLSGIPFNGPIGAARVGYINDQYVLNPTQDELKESKLDLVVAGTEAAVLMVESEAQLLSEDQMLGAVVFGHEQQQVVIQNINELVKEAGKPRWDWQPEPVNEALNARVAALAEARLSDAYRITDKQERYAQVDVIKSETIATLLAEDETLDENELGEILHAIEKNVVRSRVLAGEPRIDGREKDMIRGLDVRTGVLPRTHGSALFTRGETQALVTATLGTARDAQVLDELMGERTDTFLFHYNFPPYSVGETGMVGSPKRREIGHGRLAKRGVLAVMPDMDKFPYTVRVVSEITESNGSSSMASVCGASLALMDAGVPIKAAVAGIAMGLVKEGDNYVVLSDILGDEDHLGDMDFKVAGSRDGISALQMDIKIEGITKEIMQVALNQAKGARLHILGVMEQAINAPRGDISEFAPRIHTIKINPDKIKDVIGKGGSVIRALTEETGTTIEIEDDGTVKIAATDGEKAKHAIRRIEEITAEIEVGRVYTGKVTRIVDFGAFVAIGGGKEGLVHISQIADKRVEKVTDYLQMGQEVPVKVLEVDRQGRIRLSIKEATEQSQPAAAPEAPAAEQGE

SEQ ID NO: 10313 - protein, 89 aa, Escherichia coli
MSLSTEATAKIVSEFGRDANDTGSTEVQVALLTAQINHLQGHFAEHKKDHHSRRGLLRMVSQRRKLLDYLKRKDVARYTQLIERLGLRR

SEQ ID NO: 10314 - protein, 890 aa, Escherichia coli
MTDVTIKTLAAERQTSVERLVQQFADAGIRKSADDSVSAQEKQTLIDHLNQKNSGPDKLTLQRKTRSTLNIPGTGGKSKSVQIEVRKKRTFVKRDPQEAERLAAEEQAQREAEEQARREAEESAKREAQQKAEREAAEQAKREAAEQAKREAAEKDKVSNQQDDMTKNAQAEKARREQEAAELKRKAEEEARRKLEEEARRVAEEARRMAEENKWTDNAEPTEDSSDYHVTTSQHARQAEDESDREVEGGRGRGRNAKAARPKKGNKHAESKADREEARAAVRGGKGGKRKGSSLQQGFQKPAQAVNRDVVIGETITVGELANKMAVKGSQVIKAMMKLGAMATINQVIDQETAQLVAEEMGHKVILRRENELEEAVMSDRDTGAAAEPRAPVVTIMGHVDHGKTSLLDYIRSTKVASGEAGGITQHIGAYHVETENGMITFLDTPGHAAFTSMRARGAQATDIVVLVVAADDGVMPQTIEAIQHAKAAQVPVVVAVNKIDKPEADPDRVKNELSQYGILPEEWGGESQFVHVSAKAGTGIDELLDAILLQAEVLELKAVRKGMASGAVIESFLDKGRGPVATVLVREGTLHKGDIVLCGFEYGRVRAMRNELGQEVLEAGPSIPVEILGLSGVPAAGDEVTVVRDEKKAREVALYRQGKFREVKLARQQKSKLENMFANMTEGEVHEVNIVLKADVQGSVEAISDSLLKLSTDEVKVKIIGSGVGGITETDATLAAASNAILVGFNVRADASARKVIEAESLDLRYYSVIYNLIDEVKAAMSGMLSPELKQQIIGLAEVRDVFKSPKFGAIAGCMVTEGVVKRHNPIRVLRDNVVIYEGELESLRRFKDDVNEVRNGMECGIGVKNYNDVRTGDVIEVFEIIEIQRTIA

SEQ ID NO: 10315 - protein, 495 aa, Escherichia coli [sequence omitted]

SEQ ID NO: 10316 - protein, 445 aa, Escherichia coli
MSNRKYFGTDGIRGRVGDAPITPDFVLKLGWAAGKVLARHGSRKIIIGKDTRISGYMLESALEAGLAAAGLSALFTGPMPTPAVAYLTRTFRAEAGIVISASHNPFYDNGIKFFSIDGTKLPDAVEEAIEAEMEKEISCVDSAELGKASRIVDAAGRYIEFCKATFPNELSLSELKIVVDCANGATYHIAPNVLRELGANVIAIGCEPNGVNINAEVGATDVRALQARVLAEKADLGIAFDGDGDRVIMVDHEGNKVDGDQIMYIIAREGLRQGQLRGGAVGTLMSNMGLELALKQLGIPFARAKVGDRYVLEKMQEKGWRIGAENSGHVILLDKTTTGDGIVAGLQVLAAMARNHMSLHDLCSGMKMFPQILVNVRYTAGSGDPLEHESVKAVTAEVEAALGNRGRVLLRKSGTEPLIRVMVEGEDEAQVTEFAHRIADAVKAV

SEQ ID NO: 10317 - protein, 297 aa, Escherichia coli
MLRGFFLSIHTRDNIMKLFAQGTSLDLSHPHVMGILNVTPDSFSDGGTHNSLIDAVKHANLMINAGATIIDVGGESTRPGAAEVSVEEELQRVIPVVEAIAQRFEVWISVDTSKPEVIRESAKVGAHIINDIRSLSEPGALEAAAETGLPVCLMHMQGNPKTMQEAPKYDDVFAEVNRYFIEQIARCEQAGIAKEKLLLDPGFGFGKNLSHNYSLLARLAEFHHFNLPLLVGMSRKSMIGQLLNVGPSERLSGSLACAVIAAMQGAHIIRVHDVKETVEAMRVVEATLSAKENKRYE

SEQ ID NO: 10318 - protein, 644 aa, Escherichia coli
MAKNLILWLVIAVVLMSVFQSFGPSESNGRKVDYSTFLQEVNNDQVREARINGREINVTKKDSNRYTTYIPVQDPKLLDNLLTKNVKVVGEPPEEPSLLASIFISWFPMLLLIGVWIFFMRQMQGGGGKGAMSFGKSKARMLTEDQIKTTFADVAGCDEAKEEVAELVEYLREPSRFQKLGGKIPKGVLMVGPPGTGKTLLAKAIAGEAKVPFFTISGSDFVEMFVGVGASRVRDMFEQAKKAAPCIIFIDEIDAVGRQRGAGLGGGHDEREQTLNQMLVEMDGFEGNEGIIVIAATNRPDVLDPALLRPGRFDRQVVVGLPDVRGREQILKVHMRRVPLAPDIDAAIIARGTPGFSGADLANLVNEAALFAARGNKRVVSMVEFEKAKDKIMMGAERRSMVMTEAQKESTAYHEAGHAIIGRLVPEHDPVHKVTIIPRGRALGVTFFLPEGDAISASRQKLESQISTLYGGRLAEEIIYGPEHVSTGASNDIKVATNLARNMVTQWGFSEKLGPLLYAEEEGEVFLGRSVAKAKHMSDETARIIDQEVKALIERNYNRARQLLTDNMDILHAMKDALMKYETIDAPQIDDLMARRDVRPPAGWEEPGASNNSGDNGSPKAPRPVDEPRTPNPGNTMSEQLGDK

SEQ ID NO: 10319 - protein, 85 aa, Escherichia coli
MAHKKAGGSTRNGRDSEAKRLGVKRFGGESVLAGSIIVRQRGTKFHAGANVGCGRDHTLFAKADGKVKFEVKGPKNRKFISIEAE

SEQ ID NO: 10320 - protein, 103 aa, Escherichia coli [sequence omitted]

SEQ ID NO: 10321 - protein, 323 aa, Escherichia coli
MNLEKINELTAQDMAGVNAAILEQLNSDVQLINQLGYYIVSGGGKRIRPMIAVLAARAVGYEGNAHVTIAALIEFIHTATLLHDDVVDESDMRRGKATANAAFGNAASVLVGDFIYTRAFQMMTSLGSLKVLEVMSEAVNVIAEGEVLQLMNVNDPDITEENYMRVIYSKTARLFEAAAQCSGILAGCTPEEEKGLQDYGRYLGTAFQLIDDLLDYNADGEQLGKNVGDDLNEGKPTLPLLHAMHHGTPEQAQMIRTAIEQGNGRHLLEPVLEAMNACGSLEWTRQRAEEEADKAIAALQVLPDTPWREALIGLAHIAVQRDR

SEQ ID NO: 10322 - protein, 419 aa, Escherichia coli
MDKFRVQGPTKLQGEVTISGAKNAALPILFAALLAEEPVEIQNVPKLKDVDTSMKLLSQLGAKVERNGSVHIDARDVNVFCAPYDLVKTMRASIWALGPLVARFGQGQVSLPGGCTIGARPVDLHISGLEQLGATIKLEEGYVKASVDGRLKGAHIVMDKVSVGATVTIMCAATLAEGTTIIENAAREPEIVDTANFLITLGAKISGQGTDRIVIEGVERLGGGVYRVLPDRIETGTFLVAAAISRGKIICRNAQPDTLDAVLAKLRDAGADIEVGEDWISLDMHGKRPKAVNVRTAPHPAFPTDMQAQFTLLNLVAEGTGFITETVFENRFMHVPELSRMGAHAEIESNTVICHGVEKLSGAQVMATDLRASASLVLAGCIAEGTTVVDRIYHIDRGYERIEDKLRALGANIERVKGE

SEQ ID NO: 10323 - protein, 284 aa, Escherichia coli
MVLMIVSGRSGSGKSVALRALEDMGFYCVDNLPVVLLPDLARTLADREISAAVSIDVRNMPESPEIFEQAMSNLPDAFSPQLLFLDADRNTLIRRYSDTRRLHPLSSKNLSLESAIDKESDLLEPLRSRADLIVDTSEMSVHELAEMLRTRLLGKRERELTMVFESFGFKHGIPIDADYVFDVRFLPNPHWDPKLRPMTGLDKPVAAFLDRHTEVHNFIYQTRSYLELWLPMLETNNRSYLTVAIGCTGGKHRSVYIAEQLADYFRSRGKNVQSRHRTLEKRKP

SEQ ID NO: 10324 - protein, 242 aa, Escherichia coli
MSKSRLTVFSFVRRFLLRLMVVLAVFWGGGIALFSVAPVPFSAVMVERQVSAWLHGNFRYVAHSDWVSMDQISPWMGLAVIAAEDQKFPEHWGFDVASIEKALAHNERNENRIRGASTISQQTAKNLFLWDGRSWVRKGLEAGLTLGIETVWSKKRILTVYLNIAEFGDGVFGVEAAAQRYFHKPASKLTRSEAALLAAVLPNPLRFKVSSPSGYVRSRQAWILRQMYQLGGEPFMQQHQLD

SEQ ID NO: 10325 - protein, 1517 aa, Escherichia coli
MTRKPRRHALSVPVRSGSEVGFPQSLGEVHDMLYDKSLERDNCGFGLIAHIEGEPSHKVVRTAIHALARMQHRGAILADGKTGDGCGLLLQKPDRFFRIVAQERGWRLAKNYAVGMLFLNKDPELAAAARRIVEEELQRETLSIVGWRDVPTNEGVLGEIALSSLPRIEQIFVNAPAGWRPRDMERRLFIARRRIEKRLEADKDFYVCSLSNLVNIYKGLCMPTDLPRFYLDLADLRLESAICLFHQRFSTNTVPRWPLAQPFRYLAHNGEINTITGNRQWARARTYKFQTPLIPDLHDAAPFVNETGSDSSSMDNMLELLLAGGMDIIRAMRLLVPPAWQNNPDMDPELRAFFDFNSMHMEPWDGPAGIVMSDGRFAACNLDRNGLRPARYVITKDKLITCASEVGIWDYQPDEVVEKGRVGPGELMVIDTRSGRILHSAETDDDLKSRHPYKEWMEKNVRRLVPFEDLPDEEVGSRELDDDTLASYQKQFNYSAEELDSVIRVLGENGQEAVGSMGDDTPFAVLSSQPRIIYDYFRQQFAQVTNPPIDPLREAHVMSLATSIGREMNVFCEAEGQAHRLSFKSPILLYSDFKQLTTMKEEHYRADTLDITFDVTKTTLEATVKELCDKAEKMVRSGTVLLVLSDRNIAKDRLPVPAPMAVGAIQTRLVDQSLRCDANIIVETASARDPHHFAVLLGFGATAIYPYLAYETLGRLVDTHAIAKDYRTVMLNYRNGINKGLYKIMSKMGISTIASYRCSKLFEAVGLHDDVVGLCFQGAVSRIGGASFEDFQQDLLNLSKRAWLARKPISQGGLLKYVHGGEYHAYNPDVVRTLQQAVQSGEYSDYQEYAKLVNERPATTLRDLLAITPGENAVNIADVEPASELFKRFDTAAMSIGALSPEAHEALAEAMNSIGGNSNSGEGGEDPARYGTNKVSRIKQVASGRFGVTPAYLVNADVIQIKVAQGAKPGEGGQLPGDKVTPYIAKLRYSVPGVTLISPPPHHDIYSIEDLAQLIFDLKQVNPKAMISVKLVSEPGVGTIATGVAKAYADLITIAGYDGGTGASPLSSVKYAGCPWELGLVETQQALVANGLRHKIRLQVDGGLKTGVDIIKAAILGAESFGFGTGPMVALGCKYLRICHLNNCATGVATQDDKLRKNHYHGLPFKVTNYFEFIARETRELMAQLGVTRLVDLIGRTDLLKELDGFTAKQQKLALSKLLETAEPHPGKALYCTENNPPFDNGLLNAQLLQQAKPFVDERQSKTFWFDIRNTDRSVGASLSGYIAQTHGDQGLAADPIKAYFNGTAGQSFGVWNAGGVELYLTGDANDYVGKGMAGGLIAIRPPVGSAFRSHEASIIGNTCLYGATGGRLYAAGRAGERFGVRNSGAITVVEGIGDNGCEYMTGGIVCILGKTGVNFGAGMTGGFAYVLDESGDFRKRVNPELVEVLSVDALAIHEEHLRGLITEHVQHTGSQRGEEILANWSTFATKFALVKPKSSDVKALLGHRSRSAAELRVQAQ

SEQ ID NO: 10326 - protein, 130 aa, Escherichia coli
MAENQYYGTGRRKSSAARVFIKPGNGKIVINQRSLEQYFGRETARMVVRQPLELVDMVEKLDLYITVKGGGISGQAGAIRHGITRALMEYDESLRSELRKAGFVTRDARQVERKKVGLRKARRRPQFSKR

SEQ ID NO: 10327 - protein, 142 aa, Escherichia coli [sequence omitted]

SEQ ID NO: 10328 - protein, 655 aa, Escherichia coli
MGIFSIANQHIRFAVKLATAIVLALFVGFHFQLETPRWAVLTAAIVAAGTAFAAGGEPYSGAIRYRGFLRIIGTFIGCIAGLVIIIAMIRAPLLMILVCCIWAGFCTWISSLVRIENSYAWGLAGYTALIIVITIQPEPLLTPQFAVERCSEIVIGIVCAIMADLLFSPRSIKQEVDRELESLLVAQYQLMQLCIKHGDGEVVDKAWGDLVRRTTALQGMRSNLNMESSRWARANRRLKAINTLSLTLITQSCETYLIQNTRPELITDTFREFFDTPVETAQDVHKQLKRLRRVIAWTGERETPVTIYSWVAAATRYQLLKRGVISNTKINATEEEILQGEPEVKVESAERHHAMVNFWRTTLSCILGTLFWLWTGWTSGSGAMVMIAVVTSLAMRLPNPRMVAIDFIYGTLAALPLGLLYFLVIIPNTQQSMLLLCISLAVLGFFLGIEVQKRRLGSMGALASTINIIVLDNPMTFHFSQFLDSALGQIVGCVLAFTVILLVRDKSRDRTGRVLLNQFVSAAVSAMTTNVARRKENHLPALYQQLFLLMNKFPGDLPKFRLALTMIIAHQRLRDAPIPVNEDLSAFHRQMRRTADHVISARSDDKRRRYFGQLLEELEIYQEKLRIWQAPPQVTEPVNRLAGMLHKYQHALTDS

SEQ ID NO: 10329 - protein, 156 aa, Escherichia coli
MDIRKIKKLIELVEESGISELEISEGEESVRISRAAPAASFPVMQQAYAAPMMQQPAQSNAAAPATVPSMEAPAAAEISGHIVRSPMVGTFYRTPSPDAKAFIEVGQKVNVGDTLCIVEAMKMMNQIEADKSGTVKAILVESGQPVEFDEPLVVIE

SEQ ID NO: 10330 - protein, 449 aa, Escherichia coli
MLDKIVIANRGEIALRILRACKELGIKTVAVHSSADRDLKHVLLADETVCIGPAPSVKSYLNIPAIISAAEITGAVAIHPGYGFLSENANFAEQVERSGFIFIGPKAETIRLMGDKVSAIAAMKKAGVPCVPGSDGPLGDDMDKNRAIAKRIGYPVIIKASGGGGGRGMRVVRGDAELAQSISMTRAEAKAAFSNDMVYMEKYLENPRHVEIQVLADGQGNAIYLAERDCSMQRRHQKVVEEAPAPGITPELRRYIGERCAKACVDIGYRGAGTFEFLFENGEFYFIEMNTRIQVEHPVTEMITGVDLIKEQLRIAAGQPLSIKQEEVHVRGHAVECRINAEDPNTFLPSPGKITRFHAPGGFGVRWESHIYAGYTVPPYYDSMIGKLICYGENRDVAIARMKNALQELIIDGIKTNVDLQIRIMNDENFQHGGTNIHYLEKKLGLQEK

SEQ ID NO: 10331 - protein, 1034 aa, Escherichia coli
MANFFIRRPIFAWVLAIILMMAGALAILQLPVAQYPTIAPPAVSVSANYPGADAQTVQDTVTQVIEQNMNGIDNLMYMSSTSDSAGSVTITLTFQSGTDPDIAQVQVQNKLQLATPLLPQEVQQQGISVEKSSSSYLMVAGFVSDNPGTTQDDISDYVASNVKDTLSRLNGVGDVQLFGAQYAMRIWLDADLLNKYKLTPVDVINQLKVQNDQIAAGQLGGTPALPGQQLNASIIAQTRFKNPEEFGKVTLRVNSDGSVVRLKDVARVELGGENYNVIARINGKPAAGLGIKLATGANALDTAKAIKAKLAELQPFFPQGMKVLYPYDTTPFVQLSIHEVVKTLFEAIMLVFLVMYLFLQNMRATLIPTIAVPVVLLGTFAILAAFGYSINTLTMFGMVLAIGLLVDDAIVVVENVERVMMEDKLPPKEATEKSMSQIQGALVGIAMVLSAVFIPMAFFGGSTGAIYRQFSITIVSAMALSVLVALILTPALCATLLKPVSAEHHENKGGFFGWFNTTFDHSVNHYTNSVGKILGSTGRYLLIYALIVAGMVVLFLRLPSSFLPEEDQGVFLTMIQLPAGATQERTQKVLDQVTDYYLKNEKANVESVFTVNGFSFSGQAQNAGMAFVSLKPWEERNGDENSAEAVIHRAKMELGKIRDGFVIPFNMPAIVELGTATGFDFELIDQAGLGHDALTQARNQLLGMAAQHPASLVSVRPNGLEDTAQFKLEVDQEKAQALGVSLSDINQTISTALGGTYVNDFIDRGRVKKLYVQADAKFRMLPEDVDKLYVRSANGEMVPFSAFTTSHWVYGSPRLERYNGLPSMEIQGEAAPGTSSGDAMALMENLASKLPAGIGYDWTGMSYQERLSGNQAPALVAISFVVVFLCLAALYESWSIPVSVMLVVPLGIVGVLLAATLFNQKNDVYFMVGLLTTIGLSAKNAILIVEFAKDLMEKEGKGVVEATLMAVRMRLRPILMTSLAFILGVLPLAISNGAGSGAQNAVGIGVMGGMVSATLLAIFFVPVFFVVIRRCFKG

SEQ ID NO: 10332 - protein, 272 aa, Escherichia coli
METYAVFGNPIAHSKSPFIHQQFAQQLNIEHPYGRVLAPINDFINTLNAFFSAGGKGANVTVPFKEEAFARADELTERAALAGAVNTLMRLEDGRLLGDNTDGVGLLSDLERLSFIRPGLRILLIGAGGASRGVLLPLLSLDCAVTITNRTVSRAEELAKLFAHTGSIQALSMDELEGHEFDLIINATSSGISGDIPAIPSSLIHPGIYCYDMFYQKGKTPFLAWCEQRGSKRNADGLGMLVAQAAHAFLLWHGVLPDVEPVIKQLQEELSA

SEQ ID NO: 10333 - protein, 127 aa, Escherichia coli [sequence omitted]

SEQ ID NO: 10334 - protein, 329 aa, Escherichia coli [sequence omitted]

SEQ ID NO: 10335 - protein, 206 aa, Escherichia coli
MARYLGPKLKLSRREGTDLFLKSGVRAIDTKCKIEQAPGQHGARKPRLSDYGVQLREKQKVRRIYGVLERQFRNYYKEAARLKGNTGENLLALLEGRLDNVVYRMGFGATRAEARQLVSHKAIMVNGRVVNIASYQVSPNDVVSIREKAKKQSRVKAALELAEQREKPTWLEVDAGKMEGTFKRKPERSDLSADINEHLIVELYSK

SEQ ID NO: 10336 - protein, 129 aa, Escherichia coli
MAKAPIRARKRVRKQVSDGVAHIHASFNNTIVTITDRQGNALGWATAGGSGFRGSRKSTPFAAQVAAERCADAVKEYGIKNLEVMVKGPGPGRESTIRALNAAGFRITNITDVTPIPHNGCRPPKKRRV

SEQ ID NO: 10337 - protein, 118 aa, Escherichia coli
MARIAGINIPDHKHAVIALTSIYGVGKTRSKAILAAAGIAEDVKISELSEGQIDTLRDEVAKFVVEGDLRREISMSIKRLMDLGCYRGLRHRRGLPVRGQRTKTNARTRKGPRKPIKK

SEQ ID NO: 10338 - protein, 38 aa, Escherichia coli [sequence omitted]

SEQ ID NO: 10339 - protein, 443 aa, Escherichia coli
MAKQPGLDFQSAKGGLGELKRRLLFVIGALIVFRIGSFIPIPGIDAAVLAKLLEQQRGTIIEMFNMFSGGALSRASIFALGIMPYISASIIIQLLTVVHPTLAEIKKEGESGRRKISQYTRYGTLVLAIFQSIGIATGLPNMPGMQGLVINPGFAFYFTAVVSLVTGTMFLMWLGEQITERGIGNGISIIIFAGIVAGLPPAIAHTIEQARQGDLHFLVLLLVAVLVFAVTFFVVFVERGQRRIVVNYAKRQQGRRVYAAQSTHLPLKVNMAGVIPAIFASSIILFPATIASWFGGGTGWNWLTTISLYLQPGQPLYVLLYASAIIFFCFFYTALVFNPRETADNLKKSGAFVPGIRPGEQTAKYIDKVMTRLTLVGALYITFICLIPEFMRDAMKVPFYFGGTSLLIVVVVIMDFMAQVQTLMMSSQYESALKKANLKGYGR

SEQ ID NO: 10340 - protein, 144 aa, Escherichia coli [sequence omitted]

SEQ ID NO: 10341 - protein, 59 aa, Escherichia coli [sequence omitted]

SEQ ID NO: 10342 - protein, 167 aa, Escherichia coli
MAHIEKQAGELQEKLIAVNRVSKTVKGGRIFSFTALTVVGDGNGRVGFGYGKAREVPAAIQKAMEKARRNMINVALNNGTLQHPVKGVHTGSRVFMQPASEGTGIIAGGAMRAVLEVAGVHNVLAKAYGSTNPINVVRATIDGLENMNSPEMVAAKRGKSVEEILGK

SEQ ID NO: 10343 - protein, 117 aa, Escherichia coli [sequence omitted]

SEQ ID NO: 10344 - protein, 177 aa, Escherichia coli [sequence omitted]

SEQ ID NO: 10345 - protein, 130 aa, Escherichia coli
MSMQDPIADMLTRIRNGQAANKAAVTMPSSKLKVAIANVLKEEGFIEDFKVEGDTKPELELTLKYFQGKAVVESIQRVSRPGLRIYKRKDELPKVMAGLGIAVVSTSKGVMTDRAARQAGLGGEIICYVA

SEQ ID NO: 10346 - protein, 101 aa, Escherichia coli
MAKQSMKAREVKRVALADKYFAKRAELKAIISDVNASDEDRWNAVLKLQTLPRDSSPSRQRNRCRQTGRPHGFLRKFGLSRIKVREAAMRGEIPGLKKASW

SEQ ID NO: 10347 - protein, 179 aa, Escherichia coli [sequence omitted]

SEQ ID NO: 10348 - protein, 104 aa, Escherichia coli [sequence omitted]

SEQ ID NO: 10349 - protein, 123 aa, Escherichia coli [sequence omitted]

SEQ ID NO: 10350 - protein, 84 aa, Escherichia coli
MTDKIRTLQGRVVSDKMEKSIVVAIERFVKHPIYGKFIKRTTKLHVHDENNECGIGDVVEIRECRPLSKTKSWTLVRVVEKAVL

SEQ ID NO: 10351 - protein, 63 aa, Escherichia coli [sequence omitted]

SEQ ID NO: 10352 - protein, 136 aa, Escherichia coli [sequence omitted]

SEQ ID NO: 10353 - protein, 233 aa, Escherichia coli
MGQKVHPNGIRLGIVKPWNSTWFANTKEFADNLDSDFKVRQYLTKELAKASVSRIVIERPAKSIRVTIHTARPGIVIGKKGEDVEKLRKVVADIAGVPAQINIAEVRKPELDAKLVADSITSQLERRVMFRRAMKRAVQNAMRLGAKGIKVEVSGRLGGAEIARTEWYREGRVPLHTLRADIDYNTSEAHTTYGVIGVKVWIFKGEILGGMAAVEQPEKPAAQPKKQQRKGRK

SEQ ID NO: 10354 - protein, 110 aa, Escherichia coli [sequence omitted]

SEQ ID NO: 10355 - protein, 92 aa, Escherichia coli
MPRSLKKGPFIDLHLLKKVEKAVESGDKKPLRTWSRRSTIFPNMIGLTIAVHNGRQHVPVFVTDEMVGHKLGEFAPTRTYRGHAADKKAKKK

SEQ ID NO: 10356 - protein, 273 aa, Escherichia coli [sequence omitted]

SEQ ID NO: 10357 - protein, 100 aa, Escherichia coli [sequence omitted]

SEQ ID NO: 10358 - protein, 201 aa, Escherichia coli [sequence omitted]

SEQ ID NO: 10359 - protein, 209 aa, Escherichia coli [sequence omitted]

SEQ ID NO: 10360 - protein, 103 aa, Escherichia coli
MQNQRIRIRLKAFDHRLIDQATAEIVETAKRTGAQVRGPIPLPTRKERFTVLISPHVNKDARDQYEIRTHLRLVDIVEPTEKTVDALMRLDLAAGVDVQISLG

SEQ ID NO: 10361 - protein, 654 aa, Escherichia coli
MDCVMKGLNKITCCLLAALLMPCAGHAENEQYGANFNNADIRQFVEIVGQHLGKTILIDPSVQGTISVRSNDTFSQQEYYQFFLSILDLYGYSVITLDNGFLKVVRSANVKTSPGMIADSSRPGVGDELVTRIVPLENVPARDLAPLLRQMMDAGSVGNVVHYEPSNVLILTGRASTINKLIEVIKRVDVIGTEKQQIIHLEYASAEDLAEILNQLISESHGKSQMPALLSAKIVADKRTNSLIISGPEKARQRITSLLKSLDVEESEEGNTRVYYLKYAKATNLVEVLTGVSEKLKDEKGNARKPSSSGAMDNVAITADEQTNSLVITADQSVQEKLATVIARLDIRRAQVLVEAIIVEVQDGNGLNLGVQWANKNVGAQQFTNTGLPIFNAAQGVADYKKNGGITSANPAWDMFSAYNGMAAGFFNGDWGVLLTALASNNKNDILATPSIVTLDNKLASFNVGQDVPVLSGSQTTSGDNVFNTVERKTVGTKLKVTPQVNEGDAVLLEIEQEVSSVDSSSNSTLGPTFNTRTIQNAVLVKTGETVVLGGLLDDFSKEQVSKVPLLGDIPLVGQLFRYTSTERAKRNLMVFIRPTIIRDDDVYRSLSKEKYTRYRQEQQQRIDGKSKALVGSEDLPVLDENTFNSHAPAPSSR

SEQ ID NO: 10362 - protein, 394 aa, Escherichia coli [sequence omitted]

SEQ ID NO: 10363 - protein, 704 aa, Escherichia coli
MARTTPIARYRNIGISAHIDAGKTTTTERILFYTGVNHKIGEVHDGAATMDWMEQEQERGITITSAATTAFWSGMAKQYEPHRINIIDTPGHVDFTIEVERSMRVLDGAVMVYCAVGGVQPQSETVWRQANKYKVPRIAFVNKMDRMGANFLKVVNQIKTRLGANPVPLQLAIGAEEHFTGVVDLVKMKAINWNDADQGVTFEYEDIPADMVELANEWHQNLIESAAEASEELMEKYLGGEELTEAEIKGALRQRVLNNEIILVTCGSAFKNKGVQAMLDAVIDYLPSPVDVPAINGILDDGKDTPAERHASDDEPFSALAFKIATDPFVGNLTFFRVYSGVVNSGDTVLNSVKAARERFGRIVQMHANKREEIKEVRAGDIAAAIGLKDVTTGDTLCDPDAPIILERMEFPEPVISIAVEPKTKADQEKMGLALGRLAKEDPSFRVWTDEESNQTIIAGMGELHLDIIVDRMKREFNVEANVGKPQVAYRETIRQKVTDVEGKHAKQSGGRGQYGHVVIDMYPLEPGSNPKGYEFINDIKGGVIPGEYIPAVDKGIQEQLKAGPLAGYPVVDMGIRLHFGSYHDVDSSELAFKLAASIAFKEGFKKAKPVLLEPIMKVEVETPEENTGDVIGDLSRRRGMLKGQESEVTGVKIHAEVPLSEMFGYATQLRSLTKGRASYTMEFLKYDEAPSNVAQAVIEARGK

SEQ ID NO: 10364 - protein, 179 aa, Escherichia coli
MPRRRVIGQRKILPDPKFGSELLAKFVNILMVDGKKSTAESIVYSALETLAQRSGKSELEAFEVALENVRPTVEVKSRRVGGSTYQVPVEVRPVRRNALAMRWIVEAARKRGDKSMALRLANELSDAAENKGTAVKKREDVHRMAEANKAFAHYRWLSLRSFSHQAGASSKQPALGYLN

SEQ ID NO: 10365 - protein, 124 aa, Escherichia coli
MATVNQLVRKPRARKVAKSNVPALEACPQKRGVCTRVYTTTPKKPNSALRKVCRVRLTNGFEVTSYIGGEGHNLQEHSVILIRGGRVKDLPGVRYHTVRGALDCSGVKDRKQARSKYGVKRPKA

SEQ ID NO: 10366 - protein, 637 aa, Escherichia coli
MIVFSSLQIRRGVRVLLDNATATINPGQKVGLVGKNGCGKSTLLALLKNEISADGGSYTFPGSWQLAWVNQETPALPQAALEYVIDGDREYRQLEAQLHDANERNDGHAIATIHGKLDAIDAWSIRSRAASLLHGLGFSNEQLERPVSDFSGGWRMRLNLAQALICRSDLLLLDEPTNHLDLDAVIWLEKWLKSYQGTLILISHDRDFLDPIVDKIIHIEQQSMFEYTGNYSSFEVQRATRLAQQQAMYESQQERVAHLQSYIDRFRAKATKAKQAQSRIKMLERMELIAPAHVDNPFRFSFRAPESLPNPLLKMEKVSAGYGDRIILDSIKLNLVPGSRIGLLGRNGAGKSTLIKLLAGELAPVSGEIGLAKGIKLGYFAQHQLEYLRADESPIQHLARLAPQELEQKLRDYLGGFGFQGDKVTEETRRFSGGEKARLVLALIVWQRPNLLLLDEPTNHLDLDMRQALTEALIEFEGALVVVSHDRHLLRSTTDDLYLVHDRKVEPFDGDLEDYQQWLSDVQKQENQTDEAPKENANSAQARKDQKRREAELRAQTQPLRKEIARLEKEMEKLNAQLAQAEEKLGDSELYDQSRKAELTACLQQQASAKSGLEECEMAWLEAQEQLEQMLLEGQSN

SEQ ID NO: 10367 - protein, 406 aa, Escherichia coli
MAIEQTAITRATFDEVILPIYAPAEFIPVKGQGSRIWDQQGKEYVDFAGGIAVTALGHCHPALVNALKTQGETLWHISNVFTNEPALRLGRKLIEATFAERVVFMNSGTEANETAFKLARHYACVRHSPFKTKIIAFHNAFHGRSLFTVSVGGQPKYSDGFGPKPADIIHVPFNDLHAVKAVMDDHTCAVVVEPIQGEGGVTAATPEFLQGLRELCDQHQALLVFDEVQCGMGRTGDLFAYMHYGVTPDILTSAKALGGGFPISAMLTTAEIASAFHPGSHGSTYGGNPLACAVAGAAFDIINTPEVLEGIQAKRQRFVDHLQKIDQQYDVFSDIRGMGLLIGAELKPQYKGRARDFLYAGAEAGVMVLNAGPDVMRFAPSLVVEDADIDEGMQRFAHAVAKVVGA

SEQ ID NO: 10368 - protein, 847 aa, Escherichia coli
MSKVRLAIIGNGMVGHRFIEDLLDKSDAANFDITVFCEEPRIAYDRVHLSSYFSHHTAEELSLVREGFYEKHGIKVLVGERAITINRQEKVIHSSAGRTVFYDKLIMATGSYPWIPPIKGSDTQDCFVYRTIEDLNAIESCARRSKRGAVVGGGLLGLEAAGALKNLGIETHVIEFAPMLMAEQLDQMGGEQLRRKIESMGVRVHTSKNTLEIVQEGVEARKTMRFADGSELEVDFIVFSTGIRPRDKLATQCGLDVAPRGGIVINDSCQTSDPDIYAIGECASWNNRVFGLVAPGYKMAQVAVDHILGSENAFEGADLSAKLKLLGVDVGGIGDAHGRTPGARSYVYLDESKEIYKRLIVSEDNKTLLGAVLVGDTSDYGNLLQLVLNAIELPENPDSLILPAHSGSGKPSIGVDKLPDSAQICSCFDVTKGDLIAAINKGCHTVAALKAETKAGTGCGGCIPLVTQVLNAELAKQGIEVNNNLCEHFAYSRQELFHLIRVEGIKTFEELLAKHGKGYGCEVCKPTVGSLLASCWNEYILKPEHTPLQDSNDNFLANIQKDGTYSVIPRSPGGEITPEGLMAVGRIAREFNLYTKITGSQRLAMFGAQKDDLPEIWRQLIEAGFETGHAYAKALRMAKTCVGSTWCRYGVGDSVGLGVELENRYKGIRTPHKMKFGVSGCTRECSEAQGKDVGIIATEKGWNLYVCGNGGMKPRHADLLAADIDRETLIKYLDRFMMFYIRTADKLTRTAPWLENLEGGIDYLKAVIIDDKLGLNAHLEEEMARLREAVLCEWTETVNTPSAQTRFKHFINSDKRDPNVQMVPEREQHRPATPYERIPVTLVEDNA

SEQ ID NO: 10369 - protein, 108 aa, Escherichia coli
MSQWKDICKIDDILPETGVCALLGDEQVAIFRPYHSDQVFAISNIDPFFESSVLSRGLIAEHQGELWVASPLKKQRFRLSDGLCMEDEQFSVKHYEARVKDGVVQLRG

SEQ ID NO: 10370 - protein, 457 aa, Escherichia coli
MDHLPIFCQLRDRDCLIVGGGDVAERKARLLLDAGARLTVNALAFIPQFTAWADAGMLTLVEGPFDESLLDTCWLAIAATDDDALNQRVSEAAEARRIFCNVVDAPKAASFIMPSIIDRSPLMVAVSSGGTSPVLARLLREKLESLLPLHLGQVAKYAGQLRGRVKQQFATMGERRRFWEKLFVNDRLAQSLANNDQKAITETTEQLINEPLDHRGEVVLVGAGPGDAGLLTLKGLQQIQQADVVVYDRLVSDDIMNLVRRDADRVFVGKRAGYHCVPQEEINQILLREAQKGKRVVRLKGGDPFIFGRGGEELETLCNAGIPFSVVPGITAASGCSAYSGIPLTHRDYAQSVRLITGHLKTGGELDWENLAAEKQTLVFYMGLNQAATIQQKLIEHGMPGEMPVAIVENGTAVTQRVIDGTLTQLGELAQQMNSPSLIIIGRVVGLRDKLNWFSNH

SEQ ID NO: 10371 - protein, 334 aa, Escherichia coli
MTKPIVFSGAQPSGELTIGNYMGALRQWVNMQDDYHCIYCIVDQHAITVRQDAQKLRKATLDTLALYLACGIDPEKSTIFVQSHVPEHAQLGWALNCYTYFGELSRMTQFKDKSARYAENINAGLFDYPVLMAADILLYQTNLVPVGEDQKQHLELSRDIAQRFNALYGEIFKVPEPFIPKSGARVMSLLEPTKKMSKSDDNRNNVIGLLEDPKSVVKKIKRAVTDSDEPPVVRYDVQNKAGVSNLLDILSAVTGQSIPELEKQFEGKMYGHLKGEVADAVSGMLTELQERYHRFRNDEAFLQQVMKDGAEKASAHASRTLKAVYEAIGFVAKP

SEQ ID NO: 10372 - protein, 133 aa, Escherichia coli
MKEKPAVEVRLDKWLWAARFYKTRALAREMIEGGKVHYNGQRSKPSKIVELNATLTLRQGNDERTVIVKAITEQRRPASEAALLYEETAESVEKREKMALARKLNALTMPHPDRRPDKKERRDLLRFKHGDSE

SEQ ID NO: 10373 - protein, 294 aa, Escherichia coli
MIMPQHDQLHRYLFENFAVRGELVTVSETLQQILENHDYPQPVKNVLAELLVATSLLTATLKFDGDITVQLQGDGPMNLAVINGNNNQQMRGVARVQGEIPENADLKTLVGNGYVVITITPSEGERYQGVVGLEGDTLAACLEDYFMRSEQLPTRLFIRTGDVDGKPAAGGMLLQVMPAQNAQQDDFDHLATLTETIKTEELLTLPANEVLWRLYHEEEVTVYDPQDVEFKCTCSRERCADALKTLPDEEVDSILAEDGEIDMHCDYCGNHYLFNAMDIAEIRNNASPADPQVH

SEQ ID NO: 10374 - protein, 540 aa, Escherichia coli
MRVNNGLTPQELEAYGISDVHDIVYNPSYDLLYQEELDPSLTGYERGVLTNLGAVAVDTGIFTGRSPKDKYIVRDDTTRDTFWWADKGKGKNDNKPLSPETWQHLKGLVTRQLSGKRLFVVDAFCGANPDTRLSVRFITEVAWQAHFVKNMFIRPSDEELAGFKPDFIVMNGAKCTNPQWKEQGLNSENFVAFNLTERMQLIGGTWYGGEMKKGMFSMMNYLLPLKGIASMHCSANVGEKGDVAVFFGLSGTGKTTLSTDPKRRLIGDDEHGWDDDGVFNFEGGCYAKTIKLSKEAEPEIYNAIRRDALLENVTVREDGTIDFDDGSKTENTRVSYPIYHIDNIVKPVSKAGHATKVIFLTADAFGVLPPVSRLTADQTQYHFLSGFTAKLAGTERGITEPTPTFSACFGAAFLSLHPTQYAEVLVKRMQAAGAQAYLVNTGWNGTGKRISIKDTRAIIDAILNGSLDNAETFTLPMFNLAIPTELPGVDTKILDPRNTYASPEQWQEKAETLAKLFIDNFDKYTDTPAGAALVAAGPKL

SEQ ID NO: 10375 - protein, 450 aa, Escherichia coli
MRRLRFSPRSSFARTLLLIVTLLFASLVTTYLVVLNFAILPSLQQFNKVLAYEVRMLMTDKLQLEDGTQLVVPPAFRREIYRELGISLYSNEAAEEAGLRWAQHYEFLSHQMAQQLGGPTEVRVEVNKSSPVVWLKTWLSPNIWVRVPLTEIHQGDFSPLFRYTLAIMLLAIGGAWLFIRIQNRPLVDLEHAALQVGKGIIPPPLREYGASEVRSVTRAFNHMAAGVKQLADDRTLLMAGVSHDLRTPLTRIRLATEMMSEQDGYLAESINKDIEECNAIIEQFIDYLRTGQEMPMEMADLNAVLGEVIAAESGYEREIETALYPGSIEVKMHPLSIKRAVANMVVNAARYGNGWIKVSSGTEPNRAWFQVEDDGPGIAPEQRKHLFQPFVRGDSARTISGTGLGLAIVQRIVDNHNGMLELGTSERGGLSIRAWLPVPVTRAQGTTKEG

SEQ ID NO: 10376 - protein, 740 aa, Escherichia coli
MPFIARYRKEITGGLDDTQLRNLETRLSYLRELEERRQAILKSISEQGKLTDDLAKAINATLSKTELEDLYLPYKPKRRTRGQIAIEAGLEPLADLLWSDPSHTPEVAAAQYVYADKGVADTKAALDGARYILMERFAEDAALLAKVRDYLWKNAHLVSTVVSGKEEEGAKFRDYFDHHEPLSTVPSHRALAMFRGRNEGVLQLSLNADPQFDEPPKESYCEQIIMDHLGLRLNNAPADSWRKGVVSWTWRIKVLMHLETELMGTVRERAEDEAINVFARNLHDLLMAAPAGLRATMGLDPGLRTGVKVAVVDATGKLVATDTIYPHTGQAAKAAMTVAALCEKHNVELVAIGNGTASRETERFYLDVQKQFPKVTAQKVIVSEAGASVYSASELAAQEFPDLDVSLRGAVSIARRLQDPLAELVKIDPKSIGVGQYQHDVSQTQLARKLDAVVEDCVNAVGVDLNTASVPLLTRVAGLTRMMAQNIVAWRDENGQFQNRQQLLKVSRLGPKAFEQCAGFLRINHGDNPLDASTVHPEAYPVVERILAATQQALKDLMGNSSELRNLKASDFTDEKFGVPTVTDIIKELEKPGRDPRPEFKTAQFADGVETMNDLQPGMILEGAVTNVTNFGAFVDIGVHQDGLVHISSLSNKFVEDPHTVVKAGDIVKVKVLEVDLQRKRIALTMRLDEQPGETNARRGGGNERPQNNRPAAKPRGREAQPAGNSAMMDALAAAMGKKR

SEQ ID NO: 10377 - protein, 425 aa, Escherichia coli
MKPMHIAMALLSAAMFFVLAGVFMGVQLELDGTKLVVDTASDVRWQWVFIGTAVVFFFQLLRPAFQKGLKSVSGPKFILPAIDGSTVKQKLFLVALLVLAVAWPFMVSRGTVDIATLTMIYIILGLGLNVVVGLSGLLVLGYGGFYAIGAYTFALLNHYYGLGFWTCLPIAGLMAAAAGFLLGFPVLRLRGDYLAIVTLGFGEIVRILLLNNTEITGGPNGISQIPKPTLFGLEFSRTAREGGWDTFSNFFGLKYDPSDRVIFLYLVALLLVVLSLFVINRLLRMPLGRAWEALREDEIACRSLGLSPRRIKLTAFTISAAFAGFAGTLFAARQGFVSPESFTFAESAFVLAIVVLGGMGSQFAVILAAILLVVSRELMRDFNEYSMLMLGGLMVLMMIWRPQGLLPMTRPQLKLKNGAAKGEQA

SEQ ID NO: 10378 - protein, 497 aa, Escherichia coli
MAKEKKRGFFSWLGFGQKEQTPEKETEVQNEQPVVEEIVQAQEPVKASEQAVEEQPQAHTEAEAETFAADVVEVTEQVAESEKAQPEAEVVAQPEPVVEETPEPVAIEREELPLPEDVNAEAVSPEEWQAEAETVEIVEAAEEEAAKEEITDEELETALAAEAAEEAVMVVPPAEEEQPVEEIAQEQEKPTKEGFFARLKRSLLKTKENLGSGFISLFRGKKIDDDLFEELEEQLLIADVGVETTRKIITNLTEGASRKQLRDAEALYGLLKEEMGEILAKVDEPLNVEGKAPFVILMVGVNGVGKTTTIGKLARQFEQQGKSVMLAAGDTFRAAAVEQLQVWGQRNNIPVIAQHTGADSASVIFDAIQAAKARNIDVLIADTAGRLQNKSHLMEELKKIVRVMKKLDVEAPHEVMLTIDASTGQNAVSQAKLFHEAVGLTGITLTKLDGTAKGGVIFSVADQFGIPIRYIGVGERIEDLRPFKADDFIEALFARED

SEQ ID NO: 10379 - protein, 524 aa, Escherichia coli
MLSTLRRTLFALLACASFIVHAAAPDEITTAWPVNVGPLNPHLYTPNQMFAQSMVYEPLVKYQADGSVIPWLAKSWTHSEDGKTWTFTLRDDVKFSNGEPFDAEAAAENFRAVLDNRQRHAWLELANQIVDVKALSKTELQITLKSAYYPFLQELALPRPFRFIAPSQFKNHETMNGIKAPIGTGPWILQESKLNQYDVFVRNENYWGEKPAIKKITFNVIPDPTTRAVAFETGDIDLLYGNEGLLPLDTFARFSQNPAYHTQLSQPIETVMLALNTAKAPTNELAVREALNYAVNKKSLIDNALYGTQQVADTLFAPSVPYANLGLKPSQYDPQKAKALLEKAGWTLPAGKDIREKNGQPLRIELSFIGTDALSKSMAEIIQADMRQIGADVSLIGEEESSIYARQRDGRFGMIFHRTWGAPYDPHAFLSSMRVPSHADFQAQQGLADKPLIDKEIGEVLATHDETQRQALYRDILTRLHDEAVYLPISYISMMVVSKPELGNIPYAPIATEIPFEQIKPVKP

SEQ ID NO: 10380 - protein, 400 aa, Escherichia coli
MERFDAIIIGAGAAGMFCSALAGQAGRRVLLIDNGKKPGRKILMSGGGRCNFTNLYVEPGAYLSQNPHFCKSALARFTQWDFIDLVNKHGIAWHEKTLGQLFCDDSAQQIVDMLVDECEKGNVTFRLRSEVLSVAKDETGFTLDLNGMTVGCEKLVIATGGLSMPGLGASPFGYKIAEQFGLNVLPTRAGLVPFTLHKPLLEELQVLAGVAVPSVITAENGTVFRENLLFTHRGLSGPAVLQISSYWQPGEFVSINLLPDVDLETFLNEQRNAHPNQSLKNTLAVHLPKRLVERLQQLGQIPDVSLKQLNVRDQQALISTLTDWRVQPNGTEGYRTAEVTLGGVDTNELSSRTMEARKVPGLYFIGEVMDVTGWLGGYNFQWAWSSAWACAQDLIAAKSS

SEQ ID NO: 10381 - protein, 334 aa, Escherichia coli
MSTQEATLQQPLLQAIDLKKHYPVKKGMFAPERLVKALDGVSFNLERGKTLAVVGESGCGKSTLGRLLTMIEMPTGGELYYQGQDLLKHDPQAQKLRRQKIQIVFQNPYGSLNPRKKVGQILEEPLLINTSLSKEQRREKALSMMAKVGLKTEHYDRYPHMFSGGQRQRIAIARGLMLDPDVVIADEPVSALDVSVRAQVLNLMMDLQQELGLSYVFISHDLSVVEHIADEVMVMYLGRCVEKGTKDQIFNNPRHPYTQALLSATPRLNPDDRRERIKLSGELPSPLNPPPGCAFNARCRRRFGPCTQLQPQLKDYGGQLVACFAVDQDENPQR

SEQ ID NO: 10382 - protein, 303 aa, Escherichia coli
MQKFDTRTFQGLILTLQDYWARQGCTIVQPLDMEVGAGTSHPMTCLRELGPEPMAAAYVQPSRRPTDGRYGENPNRLQHYYQFQVVIKPSPDNIQELYLGSLKELGMDPTIHDIRFVEDNWENPTLGAWGLGWEVWLNGMEVTQFTYFQQVGGLECKPVTGEITYGLERLAMYIQGVDSVYDLVWSDGPLGKTTYGDVFHQNEVEQSTYNFEYADVDFLFTCFEQYEKEAQQLLALENPLPLPAYERILKAAHSFNLLDARKAISVTERQRYILRIRTLTKAVAEAYYASREALGFPMCNKDK

SEQ ID NO: 10383 - protein, 484 aa, Escherichia coli
MYIGIDLGTSGVKVILLNEQGEVVAAQTEKLTVSRPHPLWSEQDPEQWWQATDRAMKALGDQHSLQDVKALGIAGQMHGATLLDAQQRVLRPAILWNDGRCAQECTLLEARVPQSRVITGNLMMPGFTAPKLLWVQRHEPEIFRQIDKVLLPKDYLRLRMTGEFASDMSDAAGTMWLDVAKRDWSDVMLQACDLSRDQMPALYEGSEITGALLPEVAKAWGMATVPVVAGGGDNAAGAVGVGMVDANQAMLSLGTSGVYFAVSEGFLSKPESAVHSFCHALPQRWHLMSVMLSAASCLDWAAKLTGLSNVPALIAAAQQADESAEPVWFLPYLSGERTPHNNPQAKGVFFGLTHQHGPNELARAVLEGVGYALADGMDVVHACGIKPQSVTLIGGGARSEYWRQMLADISGQQLDYRTGGDVGPALGAARLAQIAANPEKSLIELLPQLPLEQSHLPDAQRYAAYQPRRETFRRLYQQLLPLMA

SEQ ID NO: 10384 - protein, 1377 aa, Escherichia coli
MSGKPAARQGDMTQYGGSIVQGSAGVRIGAPTGVACSVCPGGVTSGHPVNPLLGAKVLPGETDIALPGPLPFILSRTYSSYRTKTPAPVGSLGPGWKMPADIRLQLRDNTLILSDNGGRSLYFEHLFPGEDGYSRSESLWLVRGGVAKLDEGHRLAALWQALPEELRLSPHRYLATNSPQGPWWLLGWCERVPEADEVLPAPLPPYRVLTGLVDRFGRTQTFHREAAGEFSGEITGVTDGAWRHFRLVLTTQAQRAEEARQQAISGGTEPSAFPDTLPGYTEYGRDNGIRLSAVWLTHDPEYPENLPAAPLVRYGWTPRGELAVVYDRSGKQVRSFTYDDKYRGRMVAHRHTGRPEIRYRYDSDGRVTEQLNPAGLSYTYQYEKDRITITDSLDRREVLHTQGEAGLKRVVKKEHADGSVTQSQFDAVGRLRAQTDAAGRTTEYSPDVVTGLITRITTPDGRASAFYYNHHNQLTSATGPDGLELRREYDELGRLIQETAPDGDITRYRYDNPHSDLPCATEDATGSRKTMTWSRYGQLLSFTDCSGYVTRYDHDRFGQMTAVHREEGLSQYRAYDSRGQLIAVKDTQGHETRYEYNIAGDLTAVIAPDGSRNGTQYDAWGKAVRTTQGGLTRSMEYDAAGRVIRLTSENGSHTTFRYDVLDRLIQETGFDGRTQRYHHDLTGKLIRSEDEGLVTHWHYDEADRLTHRTVKGETAERWQYDERGWLTDISHISEGHRVAVHYRYDEKGRLTGERQTVHHPQTEALLWQHETRHAYNAQGLANRCIPDSLPAVEWLTYGSGYLAGMKLGDTPLVEYTRDRLHRETLRSFGRYELTTAYTPAGQLQSQHLNSLLSDRDYTWNDNGELIRISSPRQTRSYSYSTTGRLTGVHTTAANLDIRIPYATDPAGNRLPDPELHPDSTLSMWPDNRIARDAHYLYRYDRHGRLTEKTDLIPEGVIRTDDERTHRYHYDSQHRLVHYTRTQYEEPLVESRYLYDPLGRRVAKRVWRRERDLTGWMSLSRKPQVTWYGWDGDRLTTIQNDRTRIQTIYQPGSFTPLIRVETATGELAKTQRRSLADALQQSGGEDGGSVVFPPVLVQMLDRLESEILADRVSEESRRWLASCGLTVEQMQNQMDPVYTPARKIHLYHCDHRGLPLALISKEGTTEWCAEYDEWGNLLNEENPHQLQQLIRLPGQQYDEESGLYYNRHRYYDPLQGRYITQDPIGLKGGWNFYQYPLNPVTNTDPLGLEVFPRPFPLPIPWPKSPAQQQADDNAAKALTKWWNDTASQRIFDSLILNNPGLALDITMIASRGNVADTGITDRVNDIINDRFWSDGKKPDRCDVLQELIDCGDISAKDAKSTQKAWNCRHSRQSNDKKR

SEQ ID NO: 10385 - protein, 382 aa, Escherichia coli
MKALHFGAGNIGRGFIGKLLADAGIQLTFADVNQVVLDALNARHSYQVHVVGETEQVDTVSGVNAVSSIGDDVVDLIAQVDLVTTAVGPVVLERIAPAIAKGQVKRKEQGNESPLNIIACENMVRGTTQLKGHVMNALPEDAKAWVEEHVGFVDSAVDRIVPPSASATNDPLEVTVETFSEWIVDKTQFKGALPNIPGMELTDNLMAFVERKLFTLNTGHAITAYLGKLAGHQTIRDAILDEKIRAVVKGAMEESGAVLIKRYGFDADKHAAYIQKILGRFENPYLKDDVERVGRQPLRKLSAGDRLIKPLLGTLEYGLPHKNLIEGIAAAMHFRSEDDPQAQELAALIADKGPQAALAQISGLDANSEVVSEAVTAYKAMQ

SEQ ID NO: 10386 - protein, 258 aa, Escherichia coli
MIVLPRRLSDEVADRVRALIDEKNLEAGMKLPAERQLAMQLGVSRNSLREALAKLVSEGVLLSRRGGGTFIRWRHDTWSEQNIVQPLKTLMADDPDYSFDILEARYAIEASTAWHAAMRATPGDKEKIQLCFEATLSEDPDIASQADVRFHLAIAEASHNIVLLQTMRGFFDVLQSSVKHSRQRMYLVPPVFSQLTEQHQAVIDAIFAGDADGARKAMMAHLSFVHTTMKRFDEDQARHARITRLPGEHNEHSREKNA

SEQ ID NO: 10387 - protein, 396 aa, Escherichia coli [sequence omitted]

SEQ ID NO: 10388 - protein, 273 aa, Escherichia coli
MSCEELEIVWNNIKAEARTLADCEPMLASFYHATLLKHENLGSALSYMLANKLSSPIMPAIAIREVVEEAYAADPEMIASAACDIQAVRTRDPAVDKYSTPLLYLKGFHALQAYRIGHWLWNQGRRALAIFLQNQVSVTFQVDIHPAAKIGRGIMLDHATGIVVGETAVIENDVSILQSVTLGGTGKSGGDRHPKIREGVMIGAGAKILGNIEVGRGAKIGAGSVVLQPVPPHTTAAGVPARIVGKPDSDKPSMDMDQHFNGINHTFEYGDGI

SEQ ID NO: 10389 - protein, 339 aa, Escherichia coli
MNQRNASMTVIGAGSYGTALAITLARNGHEVVLWGHDPEHIATLERDRCNAAFLPDVPFPDTLHLESDLATALAASRNILVVVPSHVFGEVLRQIKPLMRPDARLVWATKGLEAETGRLLQDVAREALGDQIPLAVISGPTFAKELAAGLPTAISLASTDQTFADDLQQLLHCGKSFRVYSNPDFIGVQLGGAVKNVIAIGAGMSDGIGFGANARTALITRGLAEMSRLGAALGADPATFMGMAGLGDLVLTCTDNQSRNRRFGMMLGQGMDVQSAQEKIGQVVEGYRNTKEVRELAHRFGVEMPITEEIYQVLYCGKNAREAALTLLGRARKDERSSH

SEQ ID NO: 10390 - protein, 398 aa, Escherichia coli
MRGEFYQQLTNDLETARAEGLFKEERIITSAQQADITVADGSHVINFCANNYLGLANHPDLIAAAKAGMDSHGFGMASVRFICGTQDSHKELEQKLAAFLGMEDAILYSSCFDANGGLFETLLGAEDAIISDALNHASIIDGVRLCKAKRYRYANNDMQELEARLKEAREAGARHVLIATDGVFSMDGVIANLKGVCDLADKYDALVMVDDSHAVGFVGENGRGSHEYCDVMGRVDIITGTLGKALGGASGGYTAARKEVVEWLRQRSRPYLFSNSLAPAIVAASIKVLEMVEAGSELRDRLWANARQFREQMSAAGFTLAGADHAIIPVMLGDAVVAQKFARELQKEGIYVTGFFYPVVPKGQARIRTQMSAAHTPEQITRAVEAFTRIGKQLGVIA

SEQ ID NO: 10391 - protein, 78 aa, Escherichia coli [sequence omitted]

SEQ ID NO: 10392 - protein, 270 aa, Escherichia coli
MAIKLIAIDMDGTLLLPDHTISPAVKNAIAAARARGVNVVLTTGRPYAGVHNYLKELHMEQPGDYCITYNGALVQKAADGSTVAQTALSYDDYRFLEKLSREVGSHFHALDRTTLYTANRDISYYTVHESFVATIPLVFCEAEKMDPNTQFLKVMMIDEPAILDQAIARIPQEVKEKYTVLKSAPYFLEILDKRVNKGTGVKSLADVLGIKPEEIMAIGDQENDIAMIEYAGVGVAMDNAIPSVKEVANFVTKSNLEDGVAFAIEKYVLN

SEQ ID NO: 10393 - protein, 804 aa, Escherichia coli
MSNSYDSSSIKVLKGLDAVRKRPGMYIGDTDDGTGLHHMVFEVVDNAIDEALAGHCKEIIVTIHADNSVSVQDDGRGIPTGIHPEEGVSAAEVIMTVLHAGGKFDDNSYKVSGGLHGVGVSVVNALSQKLELVIQREGKIHRQIYEHGVPQAPLAVTGETEKTGTMVRFWPSLETFTNVTEFEYEILAKRLRELSFLNSGVSIRLRDKRDGKEDHFHYEGGIKAFVEYLNKNKTPIHPNIFYFSTEKDGIGVEVALQWNDGFQENIYCFTNNIPQRDGGTHLAGFRAAMTRTLNAYMDKEGYSKKAKVSATGDDAREGLIAVVSVKVPDPKFSSQTKDKLVSSEVKSAVEQQMNELLAEYLLENPTDAKIVVGKIIDAARAREAPRRAREMTRRKGALDLAGLPGKLADCQERDPALSELYLVEGDSAGGSAKQGRNRKNQAILPLKGKILNVEKARFDKMLSSQEVATLITALGCGIGRDEYNPDKLRYHSIIIMTDADVDGSHIRTLLLTFFYRQMPEIVERGHVYIAQPPLYKVKKGKQEQYIKDDEAMDQYQISIALDGATLHTNASAPALAGEALEKLVSEYNATQKMINRMERRYPKAMLKELIYQPTLTEADLSDEQTVTRWVNALVSELNDKEQHGSQWKFDVHTNAEQNLFEPIVRVRTHGVDTDYPLDHEFITGGEYRRICTLGEKLRGLLEEDAFIERGERRQPVASFEQALDWLVKESRRGLSIQRYKGLGEMNPEQLWETTMDPESRRMLRVTVKDAIAADQLFTTLMGDAVEPRRAFIEENALKAANIDI

SEQ ID NO: 10394 - protein, 366 aa, Escherichia coli
MKFTVEREHLLKPLQQVSGPLGGRPTLPILGNLLLQVADGTLSLTGTDLEMEMVARVALVQPHEPGATTVPARKFFDICRGLPEGAEIAVQLEGERMLVRSGRSRFSLSTLPAADFPNLDDWQSEVEFTLPQATMKRLIEATQFSMAHQDVRYYLNGMLFETEGEELRTVATDGHRLAVCSMPIGQSLPSHSVIVPRKGVIELMRMLDGGDNPLRVQIGSNNIRAHVGDFIFTSKLVDGRFPDYRRVLPKNPDKHLEAGCDLLKQAFARAAILSNEKFRGVRLYVSENQLKITANNPEQEEAEEILDVTYSGAEMEIGFNVSYVLDVLNALKCENVRMMLTDSVSSVQIEDAASQSAAYVVMPMRL

SEQ ID NO: 10395 - protein, 467 aa, Escherichia coli
MSLSLWQQCLARLQDELPATEFSMWIRPLQAELSDNTLALYAPNRFVLDWVRDKYLNNINGLLTSFCGADAPQLRFEVGTKPVTQTPQAAVTSNVAAPAQVAQTQPQRAAPSTRSGWDNVPAPAEPTYRSNVNVKHTFDNFVEGKSNQLARAAARQVADNPGGAYNPLFLYGGTGLGKTHLLHAVGNGIMARKPNAKVVYMHSERFVQDMVKALQNNAIEEFKRYYRSVDALLIDDIQFFANKERSQEEFFHTFNALLEGNQQIILTSDRYPKEINGVEDRLKSRFGWGLTVAIEPPELETRVAILMKKADENDIRLPGEVAFFIAKRLRSNVRELEGALNRVIANANFTGRAITIDFVREALRDLLALQEKLVTIDNIQKTVAEYYKIKVADLLSKRRSRSVARPRQMAMALAKELTNHSLPEIGDAFGGRDHTTVLHACRKIEQLREESHDIKEDFSNLIRTLSS

SEQ ID NO: 10396 - protein, 46 aa, Escherichia coli [sequence omitted]

SEQ ID NO: 10397 - protein, 454 aa, Escherichia coli
MSDNDTIVAQATPPGRGGVGILRISGFKAREVAETVLGKLPKPRYADYLPFKDADGSVLDQGIALWFPGPNSFTGEDVLELQGHGGPVILDLLLKRILTIPGLRIARPGEFSERAFLNDKLDLAQAEAIADLIDASSEQAARSALNSLQGAFSARVNHLVEALTHLRIYVEAAIDFPDEEIDFLSDGKIEAQLNDVIADLDAVRAEARQGSLLREGMKVVIAGRPNAGKSSLLNALAGREAAIVTDIAGTTRDVLREHIHIDGMPLHIIDTAGLREASDEVERIGIERAWQEIEQADRVLFMVDGTTTDAVDPAEIWPEFIARLPAKLPITVVRNKADITGETLGMSEVNGHALIRLSARTGEGVDVLRNHLKQSMGFDTNMEGGFLARRRHLQALEQAAEHLQQGKAQLLGAWAGELLAEELRLAQQNLSEITGEFTSDDLLGRIFSSFCIGK

SEQ ID NO: 10398 - protein, 319 aa, Escherichia coli
MAATKPAFNPPGKKGDIIFSVLVKLAALIVLLMLGGIIVSLIISSWPSIQKFGLAFLWTKEWDAPNDIYGALVPIYGTLVTSFIALLIAVPVSFGIALFLTELAPGWLKRPLGIAIELLAAIPSIVYGMWGLFIFAPLFAVYFQEPVGNIMSNIPIVGALFSGPAFGIGILAAGVILAIMIIPYIAAVMRDVFEQTPVMMKESAYGIGCTTWEVIWRIVLPFTKNGVIGGIMLGLGRALGETMAVTFIIGNTYQLDSASLYMPGNSITSALANEFAEAESGLHVAALMELGLILFVITFIVLAASKFMIMRLAKNEGAR

SEQ ID NO: 10399 - protein, 609 aa, Escherichia coli
MCGIVGAIAQRDVAEILLEGLRRLEYRGYDSAGLAVVDAEGHMTRLRRLGKVQMLAQAAEEHPLHGGTGIAHTRWATHGEPSEVNAHPHVSEHIVVVHNGIIENHEPLREELKARGYTFVSETDTEVIAHLVNWELKQGGTLREAVLRAIPQLRGAYGTVIMDSRHPDTLLAARSGSPLVIGLGMGENFIASDQLALLPVTRRFIFLEEGDIAEITRRSVNIFDKTGAEVKRQDIESNLQYDAGDKGIYRHYMQKEIYEQPNAIKNTLTGRISHGQVDLSELGPNADELLSKVEHIQILACGTSYNSGMVSRYWFESLAGIPCDVEIASEFRYRKSAVRRNSLMITLSQSGETADTLAGLRLSKELGYLGSLAICNVPGSSLVRESDLALMTNAGTEIGVASTKAFTTQLTVLLMLVAKLSRLKGLDASIEHDIVHGLQALPSRIEQMLSQDKRIEALAEDFSDKHHALFLGRGDQYPIALEGALKLKEISYIHAEAYAAGELKHGPLALIDADMPVIVVAPNNELLEKLKSNIEEVRARGGQLYVFADQDAGFVSSDNMHIIEMPHVEEVIAPIFYTVPLQLLAYHVALIKGTDVDQPRNLAKSVTVE

SEQ ID NO: 10400 - protein, 456 aa, Escherichia coli
MLNNAMSVVILAAGKGTRMYSDLPKVLHTLAGKAMVQHVIDAANELGAAHVHLVYGHGGDLLKQALKDDNLNWVLQAEQLGTGHAMQQAAPFFADDEDILMLYGDVPLISVETLQRLRDAKPQGGIGLLTVKLDDPTGYGRITRENGKVTGIVEHKDATDEQRQIQEINTGILIANGADMKRWLAKLTNNNAQGEYYITDIIALAYQEGREIVAVHPQRLSEVEGVNNRLQLSRLERVYQSEQAEKLLLAGVMLRDPARFDLRGTLTHGRDVEIDTNVIIEGNVTLGHRVKIGTGCVIKNSVIGDDCEISPYTVVEDANLAAACTIGPFARLRPGAELLEGAHVGNFVEMKKARLGKGSKAGHLTYLGDAEIGDNVNIGAGTITCNYDGANKFKTIIGDDVFVGSDTQLVAPVTVGKGATIAAGTTVTRNVGENALAISRVPQTQKEGWRRPVKKK

SEQ ID NO: 10401 - protein, 513 aa, Escherichia coli
MQLNSTEISELIKQRIAQFNVVSEAHNEGTIVSVSDGVIRIHGLADCMQGEMISLPGNRYAIALNLERDSVGAVVMGPYADLAEGMKVKCTGRILEVPVGRGLLGRVVNTLGAPIDGKGPLDHDGFSAVEAIAPGVIERQSVDQPVQTGYKAVDSMIPIGRGQRELIIGDRQTGKTALAIDAIINQRDSGIKCIYVAIGQKASTISNVVRKLEEHGALANTIVVVATASESAALQYLAPYAGCAMGEYFRDRGEDALIIYDDLSKQAVAYRQISLLLRRPPGREAFPGDVFYLHSRLLERAARVNAEYVEAFTKGEVKGKTGSLTALPIIETQAGDVSAFVPTNVISITDGQIFLETNLFNAGIRPAVNPGISVSRVGGAAQTKIMKKLSGGIRTALAQYRELAAFSQFASDLDDATRKQLDHGQKVTELLKQKQYAPMSVAQQSLVLFAAERGYLADVELSKIGSFEAALLAYVDRDHAPLMQEINQTGGYNDEIEGKLKGILDSFKATQSW

SEQ ID NO: 10402 - protein, 156 aa, Escherichia coli
MNLNATILGQAIAFVLFVLFCMKYVWPPLMAAIEKRQKEIADGLASAERAHKDLDLAKASATDQLKKAKAEAQVIIEQANKRRSQILDEAKAEAEQERTKIVAQAQAEIEAERKRAREELRKQVAILAVAGAEKIIERSVDEAANSDIVDKLVAEL

SEQ ID NO: 10403 - protein, 271 aa, Escherichia coli
MASENMTPQDYIGHHLNNLQLDLRTFSLVDPQNPPATFWTINIDSMFFSVVLGLLFLVLFRSVAKKATSGVPGKFQTAIELVIGFVNGSVKDMYHGKSKLIAPLALTIFVWVFLMNLMDLLPIDLLPYIAEHVLGLPALRVVPSADVNVTLSMALGVFILILFYSIKMKGIGGFTKELTLQPFNHWAFIPVNLILEGVSLLSKPVSLGLRLFGNMYAGELIFILIAGLLPWWSQWILNVPWAIFHILIITLQAFIFMVLTIVYLSMASEEH

SEQ ID NO: 10404 - protein, 207 aa, Escherichia coli
MLNKLSLLLKDAGISLTDHQKNQLIAYVNMLHKWNKAYNLTSVRDPNEMLVRHILDSIVVAPYLQGERFIDVGTGPGLPGIPLSIVRPEAHFTLLDSLGKRVRFLRQVQHELKLENIEPVQSRVEEFPSEPPFDGVISRAFASLNDMVSWCHHLPGEQGRFYALKGQMPEDEIALLPEEYQVESVVKLQVPALDGERHLVVIKANKI

SEQ ID NO: 10405 - protein, 629 aa, Escherichia coli
MFYPDPFDVIIIGGGHAGTEAAMAAARMGQQTLLLTHNIDTLGQMSCNPAIGGIGKGHLVKEVDALGGLMAKAIDQAGIQFRILNASKGPAVRATRAQADRVLYRQAVRTALENQPNLMIFQQAVEDLIVENDRVVGAVTQMGLKFRAKAVVLTVGTFLDGKIHIGLDNYSGGRAGDPPSIPLSRRLRELPLRVGRLKTGTPPRIDARTIDFSVLAQQHGDNPMPVFSFMGNASQHPQQVPCYITHTNEKTHDVIRSNLDRSPMYAGVIEGVGPRYCPSIEDKVMRFADRNQHQIFLEPEGLTSNEIYPNGISTSLPFDVQMQIVRSMQGMENAKIVRPGYAIEYDFFDPRDLKPTLESKFIQGLFFAGQINGTTGYEEAAAQGLLAGLNAARLSADKEGWAPARSQAYLGVLVDDLCTLGTKEPYRMFTSRAEYRLMLREDNADLRLTEIGRELGLVDDERWARFNEKLENIERERQRLKSTWVTPSAEAAAEVNAHLTAPLSREASGEDLLRRPEMTYEKLTTLTPFAPALTDEQAAEQVEIQVKYEGYIARQQDEIEKQLRNENTLLPATLDYRQVSGLSNEVIAKLNDHKPASIGQASRISGVTPAAISILLVWLKKQGMLRRSA

SEQ ID NO: 10406 - protein, 309 aa, Escherichia coli
MQNAGSLVVLGSINADHILNLQSFPTPGETVTGNHYQVAFGGKGANQAVAAGRSGANIAFIACTGDDSIGESVRQQLATDNIDITPVSVIKGESTGVALIFVNGEGENVIGIHAGANAALSPALVEAQRERIANASALLMQLESPLESVMAAAKIAHQNKTIVALNPAPARELPDELLALVDIITPNETEAEKLTGIRVENDEDAAKAAQVLHEKGIRTVLITLGSRGVWASVNGEGQRVPGFRVQAVDTIAAGDTFNGALITALLEEKPLPEAIRFAHAAAAIAVTRKGAQPSVPWREEIDAFLDRQR

SEQ ID NO: 10407 - protein, 327 aa, Escherichia coli
MNGAQWVVHALRAQGVNTVFGYPGGAIMPVYDALYDGGVEHLLCRHEQGAAMAAIGYARATGKTGVCIATSGPGATNLITGLADALLDSIPVVAITGQVSAPFIGTDAFQEVDVLGLSLACTKHSFLVQSLEELPRIMAEAFDVACSGRPGPVLVDIPKDIQLASGDLEPWFTTVENEVTFPHAEVEQARQMLAKAQKPMLYVGGGVGMAQAVPALREFLAATKMPATCTLKGLGAVEADYPYYLGMLGMHGTKAANFAVQECDLLIAVGARFDDRVTGKLNTFAPHASVIHMDIDPAEMNKLRQAHVALQGDLNALLPALQQPLNQ

SEQ ID NO: 10408 - protein, 605 aa, Escherichia coli
MVVIWRVLVRCGPTGMTDADFGKPIIAVVNSFTQFVPGHVHLRDLGKLVAEQIEAAGGVAKEFNTIAVDDGIAMGHGGMLYSLPSRELIADSVEYMVNAHCADAMVCISNCDKITPGMLMASLRLNIPVIFVSGGPMEAGKTKLSDQIIKLDLVDAMIQGADPKVSDSQSDQVERSACPTCGSCSGMFTANSMNCLTEALGLSQPGNGSLLATHADRKQLFLNAGKRIVELTKRYYEQNDESALPRNIASKAAFENAMTLDIAMGGSTNTVLHLLAAAQEAEIDFTMSDIDKLSRKVPQLCKVAPSTQKYHMEDVHRAGGVIGILGELDRAGLLNRDVKNVLGLTLPQTLEQYDVMLTQDDAVKNMFRAGPAGIRTTQAFSQDCRWDTLDDDRANGCIRSLEHAYSKDGGLAVLYGNFAENGCIVKTAGVDDSILKFTGPAKVYESQDDAVEAILGGKVVAGDVVVIRYEGPKGGPGMQEMLYPTSFLKSMGLGKACALITDGRFSGGTSGLSIGHVSPEAASGGSIGLIEDGDLIAIDIPNRGIQLQVSDAELAARREAQDARGDKAWTPKNRERQVSFALRAYASLATSADKGAVRDKSKLGG

SEQ ID NO: 10409 - protein, 491 aa, Escherichia coli
MANYFNTLNLRQQLAQLGKCRFMGRDEFADGASYLQGKKVVIVGCGAQGLNQGLNMRDSGLDISYALRKEAIAEKRASWRKATENGFKVGTYEELIPQADLVINLTPDKQHSDVVRTVQPLMKDGAALGYSHGFNIVEVGEQIRKDITVVMVAPKCPGTEVREEYKRGFGVPTLIAVHPENDPKGEGMAIAKAWAAATGGHRAGVLESSFVAEVKSDLMGEQTILCGMLQAGSLLCFDKLVEEGTDPAYAEKLIQFGWETITEALKQGGITLMMDRLSNPAKLRAYALSEQLKEIMAPLFQKHMDDIISGEFSSGMMADWANDDKKLLTWREETGKTAFETAPQYEGKIGEQEYFDKGVLMIAMVKAGVELAFETMVDSGIIEESAYYESLHELPLIANTIARKRLYEMNVVISDTAEYGNYLFSYACVPLLKPFMAELQPGDLGKAIPEGAVDNGQLRDVNEAIRSHAIEQVGKKLRGYMTDMKRIAVAG

SEQ ID NO: 10410 - protein, 419 aa, Escherichia coli
MNLTELKNTPVSELITLGENMGLENLARMRKQDIIFAILKQHAKSGEDIFGDGVLEILQDGFGFLRSADSSYLAGPDDIYVSPSQIRRFNLRTGDTISGKIRPPKEGERYFALLKVNEVNFDKPENARNKILFENLTPLHANSRLRMERGNGSTEDLTARVLDLASPIGRGQRGLIVAPPKAGKTMLLQNIAQSIAYNHPDCVLMVLLIDERPEEVTEMQRLVKGEVVASTFDEPASRHVQVAEMVIEKAKRLVEHKKDVIILLDSITRLARAYNTVVPASGKVLTGGVDANALHRPKRFFGAARNVEEGGSLTIIATALIDTGSKMDEVIYEEFKGTGNMELHLSRKIAEKRVFPAIDYNRSGTRKEELLTTQEELQKMWILRKIIHPMGEIDAMEFLINKLAMTKTNDDFFEMMKRS

SEQ ID NO: 10411 - protein, 389 aa, Escherichia coli
MSAKALAAYSKRIDVKVLTVFGTRPEAIKMAPLVHALAKDPFFEAKVCVTAQHREMLDQVLKLFSIVPDYDLNIMQPGQGLTEITCRILEGLKPILAEFKPDVVLVHGDTTTTLATSLAAFYQRIPVGHVEAGLRTGDLYSPWPEEANRTLTGHLAMYHFSPTETSRQNLLRENVADSRIFITGNTVIDALLWVRDQVMSSDKLSELAANYPFIDPDKKMILVTGHRRESFGRGFEEICHALADIATTHQDIQIVYPVHLNPNVREPVNRILGHVKNVILIDPQEYLPFVWLMNHAWLILTDSGGIQEEAPSLGKPVLVMRDTTERPEAVTAGTVRLVGTDKQRIVEEVTRLLKDENEYQAMSRAHNPYGDGQACSRILEALKNNRISL

SEQ ID NO: 10412 - protein, 320 aa, Escherichia coli
MIMTVTSMLDNVLRIATRQSPLALWQAHYVKDKLMASHPGLVVELVPMVTRGDVILDTPLAKVGGKGLFVKELEVALLENRADIAVHSMKDVPVEFPQGLGLVTICEREDPRDAFVSNNYDSLDALPAGSIVGTSSLRRQCQLAERRPDLIIRSLRGNVGTRLSKLDNGEYDAIILAVAGLKRLGLESRIRAGLPPEISLPAVGQGAVGIECRLDDSRTRELLAALNHHETALRVTAERAMNTRLEGGCQVPIGSYAELIDGEIWLRALVGRPDGSQIIRGERRGAPQDAEQMGISLAEELLNNGAREILAEVYNGDAPA

SEQ ID NO: 10413 - protein, 720 aa, Escherichia coli
MDVSYLLDSLNDKQREAVAAPRSNLLVLAGAGSGKTRVLVHRIAWLMSVENCSPYSIMAVTFTNKAAAEMRHRIGQLMGTSQGGMWVGTFHGLAHRLLRAHHMDANLPQDFQILDSEDQLRLLKRLIKAMNLDEKQWPPRQAMWYINSQKDEGLRPHHIQSYGNPVEQTWQKVYQAYQEACDRAGLVDFAELLLRAHELWLNKPHILQHYRERFTNILVDEFQDTNNIQYAWIRLLAGDTGKVMIVGDDDQSIYGWRGAQVENIQRFLNDFPGAETIRLEQNYRSTSNILSAANALIENNNGRLGKKLWTDGADGEPISLYCAFNELDEARFVVNRIKTWQDNGGALAECAILYRSNAQSRVLEEALLQASMPYRIYGGMRFFERQEIKDALSYLRLIANRNDDAAFERVVNTPTRGIGDRTLDVVRQTSRDRQLTLWQACRELLQEKALAGRAASALQRFMELIDALAQETADMPLHVQTDRVIKDSGLRTMYEQEKGEKGQTRIENLEELVTATRQFSYNEEDEDLMPLQAFLSHAALEAGEGQADTWQDAVQLMTLHSAKGLEFPQVFIVGMEEGMFPSQMSLDEGGRLEEERRLAYVGVTRAMQKLTLTYAETRRLYGKEVYHRPSRFIGELPEECVEEVRLRATVSRPVSHQRMGTPMVENDSGYKLGQRVRHAKFGEGTIVNMEGSGEHSRLQVAFQGQGIKWLVAAYARLESV

SEQ ID NO: 10414 - protein, 610 aa, Escherichia coli
MNVAQAEVLNLESGAKQVLQETFGYQQFRPGQEEIIDTVLSGRDCLVVMPTGGGKSLCYQIPALLLNGLTVVVSPLISLMKDQVDQLQANGVAAACLNSTQTREQQLEVMTGCRTGQIRLLYIAPERLMLDNFLEHLAHWNPVLLAVDEAHCISQWGHDFRPEYAALGQLRQRFPTLPFMALTATADDTTRQDIVRLLGLNDPLIQISSFDRPNIRYMLMEKFKPLDQLMRYVQEQRGKSGIIYCNSRAKVEDTAARLQSKGISAAAYHAGLENNVRADVQEKFQRDDLQIVVATVAFGMGINKPNVRFVVHFDIPRNIESYYQETGRAGRDGLPAEAMLFYDPADMAWLRRCLEEKPQGQLQDIERHKLNAMGAFAEAQTCRRLVLLNYFGEGRQEPCGNCDICLDPPKQYDGSTDAQIALSTIGRVNQRFGMGYVVEVIRGANNQRIRDYGHDKLKVYGMGRDKSHEHWVSVIRQLIHLGLVTQNIAQHSALQLTEAARPVLAESSLQLAVPRIVALKPKAMQKSFGGNYDRKLFAKLRKLRKSIADESNVPPYVVFNDATLIEMAEQMPITASEMLSVNGVGMRKLERFGKPFMALIRAHVDGDDEE

SEQ ID NO: 10415 - protein, 251 aa, Escherichia coli
MVDKSQETTHFGFQTVAKEQKADMVAHVFHSVASKYDVMNDLMSFGIHRLWKRFTIDCSGVRRGQTVLDLAGGTGDLTAKFSRLVGETGKVVLADINESMPKMGREKLRNIGVIGNVEYVQANAEALPFPDNTFDCITISFGLRNVTDKDKALRSMYRVLKPGGRLLVLEFSKPIIEPLSKAYDAYSFHVLPRIGSLVANDADSYRYLAESIRMHPDQDTLKAMMQDAGFESVDYYNLTAGVVALHRGYKF

SEQ ID NO: 10416 - protein, 387 aa, Escherichia coli
MEQVVIVDAIRTPMGRSKGGAFRNVRAEDLSAHLMRTLLARNPALEAAALDDIYWGCVQQTLEQGFNIARNAALLAEVPHSVPAVTVNRLCGSSMQALHDAARMIMTGDAQACLVGGVEHMGHVPMSHGVDFHPGLSRNVAKAAGMMGLTAEMLARMHGISREMQDAFAARSHARAWAATQSAAFKNEIIPTGGHDADGVLKQFNYDEVIRPETTVEALATLRPAFDPVNGMVTAGTSSALSDGAAAMLVMSESRAHELGLKPRARVRSMAVVGCDPSIMGYGPVPASKLALKKAGLSASDIGVFEMNEAFAAQILPCIKDLGLIEQIDEKINLNGGAIALGHPLGCSGARISTTLLNLMERKDVQFGLATMCIGLGQGIATVFERV

SEQ ID NO: 10417 - protein, 928 aa, Escherichia coli [sequence omitted]

SEQ ID NO: 10418 - protein, 469 aa, Escherichia coli
MSAEHVLTMLNEHEVKFVDLRFTDTKGKEQHVTIPAHQVNAEFFEEGKMFDGSSIGGWKGINESDMVLMPDASTAVIDPFFADSTLIIRCDILEPGTLQGYDRDPRSIAKRAEDYLRSTGIADTVLFGPEPEFFLFDDIRFGSSISGSHVAIDDIEGAWNSSTQYEGGNKGHRPAVKGGYFPVPPVDSAQDIRSEMCLVMEQMGLVVEAHHHEVATAGQNEVATRFNTMTKKADEIQIYKYVVHNVAHRFGKTATFMPKPMFGDNGSGMHCHMSLSKNGVNLFAGDKYAGLSEQALYYIGGVIKHAKAINALANPTTNSYKRLVPGYEAPVMLAYSARNRSASIRIPVVSSPKARRIEVRFPDPAANPYLCFAALLMAGLDGIKNKIHPGEAMDKNLYDLPPEEAKEIPQVAGSLEEALNELDLDREFLKAGGVFTDEAIDAYIALRREEDDRVRMTPHPVEFELYYSV

SEQ ID NO: 10419 - protein, 591 aa, Escherichia coli
MIEKLRNIAIIAHVDHGKTTLVDKLLQQSGTFDSRAETQERVMDSNDLEKERGITILAKNTAIKWNDYRINIVDTPGHADFGGEVERVMSMVDSVLLVVDAFDGPMPQTRFVTKKAFAYGLKPIVVINKVDRPGARPDWVVDQVFDLFVNLDATDEQLDFPIVYASALNGIAGLDHEDMAEDMTPLYQAIVDHVPAPDVDLDGPFQMQISQLDYNSYVGVIGIGRIKRGKVKPNQQVTIIDSEGKTRNAKVGKVLGHLGLERIETDLAEAGDIVAITGLGELNISDTVCDTQNVEALPALSVDEPTVSMFFCVNTSPFCGKEGKFVTSRQILDRLNKELVHNVALRVEETEDADAFRVSGRGELHLSVLIENMRREGFELAVSRPKVIFREIDGRKQEPYENVTLDVEEQHQGSVMQALGERKGDLKNMNPDGKGRVRLDYVIPSRGLIGFRSEFMTMTSGTGLLYSTFSHYDDVRPGEVGQRQNGVLISNGQGKAVAFALFGLQDRGKLFLGHGAEVYEGQIIGIHSRSNDLTVNCLTGKKLTNMRASGTDEAVVLVPPIRMTLEQALEFIDDDELVEVTPTSIRIRKRH

SEQ ID NO: 10420 - protein, 232 aa, Escherichia coli
MNKILLVDDDRELTSLLKELLEMEGFNVIVAHDGEQALDLLDDSIDLLLLDVMMPKKNGIDTLKALRQTHQTPVIMLTARGSELDRVLGLELGADDYLPKPFNDRELVARIRAILRRSHWSEQQQNNDNGSPTLEVDALVLNPGRQEASFDGQTLELTGTEFTLLYLLAQHLGQVVSREHLSQEVLGKRLTPFDRAIDMHISNLRRKLPDRKDGHPWFKTLRGRGYLMVSAS

SEQ ID NO: 10421 - protein, 122 aa, Escherichia coli
MFDGISLTEHQRQQMRDLMQQARHEQPPVNVSELETMHRLVTAENFDENAVRAQAEKMANEQIARQVEMAKVRNQMYRLLTPEQQAVLNEKHQQRMEQLRDVTQWQKSSSLKLLSSSNSRSQ

SEQ ID NO: 10422 - protein, 320 aa, Escherichia coli
MIKKIGVLTSGGDAPGMNAAIRGVVRSALTEGLEVMGIYDGYLGLYEDRMVQLDRYSVSDMINRGGTFLGSARFPEFRDENIRAVAIENLKKRGIDALVVIGGDGSYMGAMRLTEMGFPCIGLPGTIDNDIKGTDYTIGFFTALSTVVEAIDRLRDTSSSHQRISVVEVMGRYCGDLTLAAAIAGGCEFVVVPEVEFSREDLVNEIKAGIAKGKKHAIVAITEHMCDVDELAHFIEKETGRETRATVLGHIQRGGSPVPYDRILASRMGAYAIDLLLAGYGGRCVGIQNEQLVHHDIIDAIENMKRPFKGDWLDCAKKLY

SEQ ID NO: 10423 - protein, 329 aa, Escherichia coli
MNKWGVGLTFLLAATSVMAKDIQLLNVSYDPTRELYEQYNKAFSAHWKQQTGDNVVIRQSHGGSGKQATSVINGIEADVVTLALAYDVDAIAERGRIDKEWIKRLPDNSAPYTSTIVFLVRKGNPKQIHDWNDLIKPGVSVITPNPKSSGGARWNYLAAWGYALHHNNNDQAKAQDFVRALYKNVEVLDSGARGSTNTFVERGIGDVLIAWENEALLAANELGKDKFEIVTPSESILAEPTVSVVDKVVEKKGTKEVAEAYLKYLYSPEGQEIAAKNYYRPRDAEVAKKYENAFPKLKLFTIDEEFGGWTKAQKEHFANGGTFDQISKR

SEQ ID NO: 10424 - protein, 255 aa, Escherichia coli
MRHPLVMGNWKLNGSRHMVHELVSNLRKELAGVAGCAVAIAPPEMYIDMAKREAEGSHIMLGAQNVDLNLSGAFTGETSAAMLKDIGAQYIIIGHSERRTYHKESDELIAKKFAVLKEQGLTPVLCIGETEAENEAGKTEEVCARQIDAVLKTQGAAAFEGAVIAYEPVWAIGTGKSATPAQAQAVHKFIRDHIAKVDANIAEQVIIQYGGSVNASNAAELFAQPDIDGALVGGASLKADAFAVIVKAAEAAKQA

SEQ ID NO: 10425 - protein, 502 aa, Escherichia coli
MTEKKYIVALDQGTTSSRAVVMDHDANIISVSQREFEQIYPKPGWVEHDPMEIWATQSSTLVEVLAKADISSDQIAAIGITNQRETTIVWEKETGKPIYNAIVWQCRRTAEICEHLKRDGLEDYIRSNTGLVIDPYFSGTKVKWILDHVEGSRERARRGELLFGTVDTWLIWKMTQGRVHVTDYTNASRTMLFNIHTLDWDDKMLEVLDIPREMLPEVRRSSEVYGQTNIGGKGGTRIPISGIAGDQQAALFGQLCVKEGMAKNTYGTGCFMLMNTGEKAVKSENGLLTTIACGPTGEVNYALEGAVFMAGASIQWLRDEMKLINDAYDSEYFATKVQNTNGVYVVPAFTGLGAPYWDPYARGAIFGLTRGVNANHIIRATLESIAYQTRDVLEAMQADSGIRLHALRVDGGAVANNFLMQFQSDILGTRVERPEVREVTALGAAYLAGLAVGFWQNLDELQEKAVIEREFRPGIETTERNYRYAGWKKAVKRAMAWEEHDE

SEQ ID NO: 10426 - protein, 176 aa, Escherichia coli
MTTIVSVRRNGHVVIAGDGQATLGNTVMKGNVKKVRRLYNDKVIAGFAGGTADAFTLFELFERKLEMHQGHLVKAAVELAKDWRTDRMLRKLEALLAVADETASLIITGNGDVVQPENDLIAIGSGGPYAQAAARALLENTELSAREIAEKALDIAGDICIYTNHFHTIEELSYKA

SEQ ID NO: 10427 - protein, 386 aa, Escherichia coli
MTRKQATIAVRSGLNDDEQYGCVVPPIHLSSTYNFTGFNEPRAHDYSRRGNPTRDVVQRALAELEGGAGAVLTNTGMSAIHLVTTVFLKPGDLLVAPHDCYGGSYRLFDSLAKRGCYRVLFVDQGDEQALRAALAEKPKLVLVESPSNPLLRVVDIAKICHLAREVGAVSVVDNTFLSPALQNPLALGADLVLHSCTKYLNGHSDVVAGVVIAKDPDVVTELAWWANNIGVTGGAFDSYLLLRGLRTLVPRMELAQRNAQAIVKYLQTQPLVKKLYHPSLPENQGHEIAARQQKGFGAMLSFELDGDEQTLRRFLGGLSLFTLAESLGGVESLISHAATMTHAGMAPEARAAAGISETLLRISTGIEDGEDLIADLENGFRAANKG

SEQ ID NO: 10428 - protein, 220 aa, Escherichia coli
MELYLDTANVAEVERLARIFPIAGVTTNPSIIAASKESIWEVLPRLQKAIGDEGILFAQTMSRDAQGMVEEAKRLRDAIPGIVVKIPVTSEGLAAIKILKKEGITTLGTAVYSAAQGLLAALAGAKYVAPYVNRVDAQGGDGIRTVQELQTLLEMHAPESMVLAASFKTPRQALDCLLAGCESITLPLDVAQQMLNTPAVESAIEKFEHDWNAAFGTTHL

SEQ ID NO: 10429 - protein, 289 aa, Escherichia coli
MRQSMATKLQDGNTPCLAATPSEPRPTVLVFDSGVGGLSVYDEIRHLLPDLHYIYAFDNVAFPYGEKSEAFIVERVVAIVTAVQERYPLALAVVACNTASTVSLPALREKFDFPVVGVVPAIKPAARLTANGIVGLLATRGTVKRSYTHELIARFANECQIEMLGSAEMVELAEAKLHGEDVSLDALKRILRPWLRMKEPPDTVVLGCTHFPLLQEELLQVLPEGTRLVDSGAAIARRTAWLLEHEAPDAKSADANIAFCMAMTPGAEQLLPVLQRYGFETLEKLAVLG

SEQ ID NO: 10430 - protein, 342 aa, Escherichia coli
MNHSLKPWNTFGIDHNAQHIVCAEDEQQLLNAWQYATAEGQPVLILGEGSNVLFLEDYRGTVIINRIKGIEIHDEPDAWYLHVGAGENWHRLVKYTLQEGMPGLENLALIPGCVGSSPIQNIGAYGVELQRVCAYVDSVELATGKQVRLTAKECRFGYRDSIFKHEYQDRFAIVAVGLRLPKEWQPVLTYGDLTRLDPTTVTPQQVFNAVCHMRTTKLPDPKVNGNAGSFFKNPVVSAETAKALLSQFPTAPNYPQADGSVKLAAGWLIDQCQLKGMQIGGAAVHRQQALVLINEDNAKSEDVVQLAHHVRQKVGEKFNVWLEPEVRFIGASGEVSAVETIS

SEQ ID NO: 10431 - protein, 394 aa, Escherichia coli
MSKEKFERTKPHVNVGTIGHVDHGKTTLTAAITTVLAKTYGGAARAFDQIDNAPEEKARGITINTSHVEYDTPTRHYAHVDCPGHADYVKNMITGAAQMDGAILVVAATDGPMPQTREHILLGRQVGVPYIIVFLNKCDMVDDEELLELVEMEVRELLSQYDFPGDDTPIVRGSALKALEGDAEWEAKILELAGFLDSYIPEPERAIDKPFLLPIEDVFSISGRGTVVTGRVERGIIKVGEEVEIVGIKETQKSTCTGVEMFRKLLDEGRAGENVGVLLRGIKREEIERGQVLAKPGTIKPHTKFESEVYILSKDEGGRHTPFFKGYRPQFYFRTTDVTGTIELPEGVEMVMPGDNIKMVVTLIHPIAMDDGLRFAIREGGRTVGAGVVAKVLS

SEQ ID NO: 10432 - protein, 127 aa, Escherichia coli
MSANTEAQGSGRGLEAMKWVVVVALLLVAIVGNYLYRDIMLPLRALAVVILIAAAGGVALLTTKGKATVAFAREARTEVRKVIWPTRQETLHTTLIVAAVTAVMSLILWGLDGILVRLVSFITGLRF

SEQ ID NO: 10433 - protein, 181 aa, Escherichia coli
MSEAPKKRWYVVQAFSGFEGRVATSLREHIKLHNMEDLFGEVMVPTEEVVEIRGGQRRKSERKFFPGYVLVQMVMNDASWHLVRSVPRVMGFIGGTSDRPAPISDKEVDAIMNRLQQVGDKPRPKTLFEPGEMVRVNDGPFADFNGVVEEVDYEKSRLKVSVSIFGRATPVELDFSQVEKA

SEQ ID NO: 10434 - protein, 142 aa, Escherichia coli
MAKKVQAYVKLQVAAGMANPSPPVGPALGQQGVNIMEFCKAFNAKTDSIEKGLPIPVVITVYADRSFTFVTKTPPAAVLLKKAAGIKSGSGKPNKDKVGKISRAQLQEIAQTKAADMTGADIEAMTRSIEGTARSMGLVVED

SEQ ID NO: 10435 - protein, 234 aa, Escherichia coli
MAKLTKRMRVIREKVDATKQYDINEAIALLKELATAKFVESVDVAVNLGIDARKSDQNVRGATVLPHGTGRSVRVAVFTQGANAEAAKAAGAELVGMEDLADQIKKGEMNFDVVIASPDAMRVVGQLGQVLGPRGLMPNPKVGTVTPNVAEAVKNAKAGQVRYRNDKNGIIHTTIGKVDFDADKLKENLEALLVALKKAKPTQAKGVYIKKVSISTTMGAGVAVDQAGLSASVN

SEQ ID NO: 10436 - protein, 165 aa, Escherichia coli
MALNLQDKQAIVAEVSEVAKGALSAVVADSRGVTVDKMTELRKAGREAGVYMRVVRNTLLRRAVEGTPFECLKDAFVGPTLIAYSMEHPGAAARLFKEFAKANAKFEVKAAAFEGELIPASQIDRLATLPTYEEAIARLMATMKEASAGKLVRTLAAVRDAKEAA

SEQ ID NO: 10437 - protein, 121 aa, Escherichia coli
MSITKDQIIEAVAAMSVMDVVELISAMEEKFGVSAAAAVAVAAGPVEAAEEKTEFDVILKAAGANKVAVIKAVRGATGLGLKEAKDLVESAPAALKEGVSKDDAEALKKALEEAGAEVEVK

SEQ ID NO: 10438 - protein, 1342 aa, Escherichia coli [sequence omitted]

SEQ ID NO: 10439 - protein, 1407 aa, Escherichia coli [sequence omitted]

SEQ ID NO: 10440 - protein, 211 aa, Escherichia coli
MYQPDFPPVPFRSGLYPVVDSVQWIERLLDAGVRTLQLRIKDRRDEEVEADVVAAIALGRRYNARLFINDYWRLAIKHQAYGVHLGQEDLQATDLNAIRAAGLRLGVSTHDDMEIDVALAARPSYIALGHVFPTQTKQMPSAPQGLEQLARHVERLADYPTVAIGGISLARAPAVIATGVGSIAVVSAITQAADWRLATAQLLEIAGVGDE

SEQ ID NO: 10441 - protein, 434 aa, Escherichia coli
MKTRTQQIEELQKEWTQPRWEGITRPYSAEDVVKLRGSVNPECTLAQLGAAKMWRLLHGESKKGYINSLGALTGGQALQQAKAGIEAVYLSGWQVAADANLAASMYPDQSLYPANSVPAVVERINNTFRRADQIQWSAGIEPGDPRYVDYFLPIVADAEAGFGGVLNAFELMKAMIEAGAAAVHFEDQLASVKKCGHMGGKVLVPTQEAIQKLVAARLAADVTGVPTLLVARTDADAADLITSDCDPYDSEFITGERTSEGFFRTHAGIEQAISRGLAYAPYADLVWCETSTPDLELARRFAQAIHAKYPGKLLAYNCSPSFNWQKNLDDKTIASFQQQLSDMGYKFQFITLAGIHSMWFNMFDLANAYAQGEGMKHYVEKVQQPEFAAAKDGYTFVSHQQEVGTGYFDKVTTIIQGGTSSVTALTGSTEESQF

SEQ ID NO: 10442 - protein, 290 aa, Escherichia coli
MLPDSSVRLNKYISESGICSRREADRYIEQGNVFLNGKRATIGDQVKPGDVVKVNGQLIEPREAEDLVLIALNKPVGIVSTTEDGERDNIVDFVNHSKRVFPIGRLDKDSQGLIFLTNHGDLVNKILRAGNDHEKEYLVTVDKPITEEFIRGMSAGVPILGTVTKKCKVKKEAPFVFRITLVQGLNRQIRRMCEHFGYEVKKLERTRIMNVSLSGIPLGEWRDLTDDELIDLFKLIENSSSEVKPKAKAKPKTAGIKRPVVKMEKTAEKGGRPASNGKRFTSPGRKKKGR

SEQ ID NO: 10443 - protein, 69 aa, Escherichia coli
MNKDEAGGNWKQFKGKVKEQWGKLTDDDMTIIEGKRDQLVGKIQERYGYQKDQAEKEVVDWETRNEYRW

SEQ ID NO: 10444 - protein, 327 aa, Escherichia coli
MATRIEFHKHGGPEVLQAVEFTPADPAENEIQVENKAIGINFIDTYIRSGLYPPPSLPSGLGTEAAGIVSKVGSGVKHIKAGDRVVYAQSALGAYSSVHNIIADKAAILPAAISFEQAAASFLKGLTVYYLLRKTYEIKPDEQFLFHAAAGGVGLIACQWAKALGAKLIGTVGTAQKAQSALKAGAWQVINYREEDLVERLKEITGGKKVRVVYDSVGRDTWERSLDCLQRRGLMVSFGNSSGAVTGVNLGILNQKGSLYVTRPSLQGYITTREELTEASNELFSLIASGVIKVDVAEQQKYPLKDAQRAHEILESRATQGSSLLIP

SEQ ID NO: 10445 - protein, 471 aa, Escherichia coli
MAGNKPFNKQQAEPRERDPQVAGLKVPPHSIEAEQSVLGGLMLDNERWDDVAERVVADDFYTRPHRHIFTEMARLQESGSPIDLITLAESLERQGQLDSVGGFAYLAELSKNTPSAANISAYADIVRERAVVREMISVANEIAEAGFDPQGRTSEDLLDLAESRVFKIAESRANKDEGPKNIADVLDATVARIEQLFQQPHDGVTGVNTGYDDLNKKTAGLQPSDLIIVAARPSMGKTTFAMNLVENAAMLQDKPVLIFSLEMPSEQIMMRSLASLSRVDQTKIRTGQLDDEDWARISGTMGILLEKRNIYIDDSSGLTPTEVRSRARRIAREHGGIGLIMIDYLQLMRVPALSDNRTLEIAEISRSLKALAKELNVPVVALSQLNRSLEQRADKRPVNSDLRESGSIEQDADLIMFIYRDEVYHENSDLKGIAEIIIGKQRNGPIGTVRLTFNGQWSRFDNYAGPQYDDE

SEQ ID NO: 10446 - protein, 359 aa, Escherichia coli
MQAATVVINRRALRHNLQRLRELAPASKMVAVVKANAYGHGLLETARTLPDADAFGVARLEEALRLRAGGITKPVLLLEGFFDARDLPTISAQHFHTAVHNEEQLAALEEASLDEPVTVWMKLDTGMHRLGVRPEQAEAFYHRLTQCKNVRQPVNIVSHFARADEPKCGATEKQLAIFNTFCEGKPGQRSIAASGGILLWPQSHFDWVRPGIILYGVSPLEDRSTGADFGCQPVMSLTSSLIAVREHKAGEPVGYGGTWVSERDTRLGVVAMGYGDGYPRAAPSGTPVLVNGREVPIVGRVAMDMICVDLGPQAQDKAGDPVILWGEGLPVERIAEMTKVSAYELITRLTSRVAMKYVD

SEQ ID NO: 10447 - protein, 940 aa, Escherichia coli
MDKIEVRGARTHNLKNINLVIPRDKLIVVTGLSGSGKSSLAFDTLYAEGQRRYVESLSAYARQFLSLMEKPDVDHIEGLSPAISIEQKSTSHNPRSTVGTITEIHDYLRLLFARVGEPRCPDHDVPLAAQTVSQMVDNVLSQPEGKRLMLLAPIIKERKGEHTKTLENLASQGYIRARIDGEVCDLSDPPKLELQKKHTIEVVVDRFKVRDDLTQRLAESFETALELSGGTAVVADMDDPKAEELLFSANFACPICGYSMRELEPRLFSFNNPAGACPTCDGLGVQQYFDPDRVIQNPELSLAGGAIRGWDRRNFYYFQMLKSLADHYKFDVEAPWGSLSANVHKVVLYGSGKENIEFKYMNDRGDTSIRRHPFEGVLHNMERRYKETESSAVREELAKFISNRPCASCEGTRLRREARHVYVENTPLPAISDMSIGHAMEFFNNLKLAGQRAKIAEKILKEIGDRLKFLVNVGLNYLTLSRSAETLSGGEAQRIRLASQIGAGLVGVMYVLDEPSIGLHQRDNERLLGTLIHLRDLGNTVIVVEHDEDAIRAADHVIDIGPGAGVHGGEVVAEGPLEAIMAVPESLTGQYMSGKRKIEVPKKRVPANPEKVLKLTGARGNNLKDVTLTLPVGLFTCITGVSGSGKSTLINDTLFPIAQRQLNGATIAEPAPYRDIQGLEHFDKVIDIDQSPIGRTPRSNPATYTGVFTPVRELFAGVPESRARGYTPGRFSFNVRGGRCEACQGDGVIKVEMHFLPDIYVPCDQCKGKRYNRETLEIKYKGKTIHEVLDMTIEEAREFFDAVPALARKLQTLMDVGLTYIRLGQSATTLSGGEAQRVKLARELSKRGTGQTLYILDEPTTGLHFADIQQLLDVLHKLRDQGNTIVVIEHNLDVIKTADWIVDLGPEGGSGGGEILVSGTPETVAECEASHTARFLKPML

SEQ ID NO: 10448 - protein, 178 aa, Escherichia coli
MASRGVNKVILVGNLGQDPEVRYMPNGGAVANITLATSESWRDKATGEMKEQTEWHRVVLFGKLAEVASEYLRKGSQVYIEGQLRTRKWTDQSGQDRYTTEVVVNVGGTMQMLGGRQGGGAPAGGNIGGGQPQGGWGQPQQPQGGNQFSGGAQSRPQQSAPAAPSNEPPMDFDDDIPF

SEQ ID NO: 10449 - protein, 652 aa, Escherichia coli
MSQIHKHTIPANIADRCLINPQQYEAMYQQSINVPDTFWGEQGKILDWIKPYQKVKNTSFAPGNVSIKWYEDGTLNLAANCLDRHLQENGDRTAIIWEGDDASQSKHISYKELHRDVCRFANTLLELGIKKGDVVAIYMPMVPEAAVAMLACARIGAVHSVIFGGFSPEAVAGRIIDSNSRLVITSDEGVRAGRSIPLKKNVDDALKNPNVTSVEHVVVLKRTGGKIDWQEGRDLWWHDLVEQASDQHQAEEMNAEDPLFILYTSGSTGKPKGVLHTTGGYLVYAALTFKYVFDYHPGDIYWCTADVGWVTGHSYLLYGPLACGATTLMFEGVPNWPTPARMAQVVDKHQVNILYTAPTAIRALMAEGDKAIEGTDRSSLRILGSVGEPINPEAWEWYWKKIGNEKCPVVDTWWQTETGGFMITPLPGATELKAGSATRPFFGVQPALVDNEGNPLEGATEGSLVITDSWPGQARTLFGDHERFEQTYFSTFKNMYFSGDGARRDEDGYYWITGRVDDVLNVSGHRLGTAEIESALVAHPKIAEAAVVGIPHNIKGQAIYAYVTLNHGEEPSPELYAEVRNWVRKEIGPLATPDVLHWTDSLPKTRSGKIMRRILRKIAAGDTSNLGDTSTLADPGVVEKLLEEKQAIAMPS

SEQ ID NO: 10450 - protein, 715 aa, Escherichia coli
  VARIANT (1)...(715): Xaa = Any Amino Acid
MKKVVTVCPYCASGCKINLVVDNGKIVRAEAAQGKTNQGTLCLKGYYGWDFINDTQILTPRLKTPMIRRQRGGKLEPVSWDEALNYVAERLSAIKEKYGPDAIQTTGSSRGTGNETNYVMQKFARAVIGTNNVDCCARVXHGPSVAGLHQSVGNGAMSNAINEIDNTDLVFVFGYNPADSHPIVANHVINAKRNGAKIIVCDPRKIETARIADMHIALKNGSNIALLNAMGHVIIEENLYDKAFVASRTEGFEEYRKIVEGYTPESVEDITGVSASEIRQAARMYAQAKSAAILWGMGVTQFYQGVETVRSLTSLAMLTGNLGKPHAGVNPVRGQNNVQGACDMGALPDTYPGYQYVKDPANREKFAKAWGVESLPAHTGYRISELPHRAAHGEVRAAYIMGEDPLQTDAELSAVRKAFEDLELVIVQDIFMTKTASAADVILPSTSWGEHEGVFTAADRGFQRFFKAVEPKWDLKTDWQIISEIATRMGYPMHYNNTQEIWDELRHLCPDFYGATYEKMGELGFIQWPCRDTSDADQGTSYLFKEKFDTPNGLAQFFTCDWVAPIDKLTDEYPMVLSTVREVGHYSCRSMTGNCAALAALADEPGYAQINTEDAKRLGIEDEALVWVHSRKGKIITRAQVSDRPNKGAIYMTYQWWIGACNELVTENLSPITKTPEYKYCAVRVEPIADQRAAEQYVIDEYNKLKTRLREAALA

SEQ ID NO: 10451 - protein, 149 aa, Escherichia coli
MKKIAFGCDHVGFILKHEIVAHLVERGVEVIDKGTWSSERTDYPHYASQVALAVAGGEVDGGILICGTGVGISIAANKFAGIRAVVCSEPYSAQLSRQHNDTNVLAFGSRVVGLELAKMIVDAWLGAQYEGGRHQQRVEAITAIEQRRN

SEQ ID NO: 10452 - protein, 378 aa, Escherichia coli
MIINNVKLVLENEVVSGSLEVQNGEIRAFAESQSRLPEAMDGEGGWLLPGLIELHTDNLDKFFTPRPKVDWPAHSAMSSHDALMVASGITTVLDAVAIGDVRDGGDRLENLEKMINAIEETQKRGVNRAEHRLHLRCELPHHTTLPLFEKLVQREPVTLVSLMDHSPGQRQFANREKYREYYQGKYSLTDAQMQQYEEEQLALAARWSQPNRESIAALCRARKIALASHDDATHAHVAESHQLGSVIAEFPTTFEAAEASRKHGMNVLMGAPNIVRGGSHSGNVAASELAQLGLLDILSSDYYPASLLDAAFRVADDQSNRFTLPQAVKLVTKNPAQALNLQDRGVIGEGKRADLVLAHRKDNHIHIDHVWRQGKRVF

SEQ ID NO: 10453 - protein, 505 aa, Escherichia coli
MSEQETRGANEAIDFNDELRNRREKLAALRQQGVAFPNDFRRDHTSDQLHEEFDAKDNQELESLNIEVSVAGRMMTRRIMGKASFVTLQDVGGRIQLYVARDSLPEGVYNDQFKKWDLGDIIGARGTLFKTQTGELSIHCTELRLLTKALRPLPDKFHGLQDQEVRYRQRYLDLIANDKSRQTFVVRSKILAAIRQFMVARGFMEVETPMMQVIPGGASARPFITHHNALDLDMYLRIAPELYLKRLVVGGFERVFEINRNFRNEGISVRHNPEFTMMELYMAYADYHDLIELTESLFRTLAQEVLGTTKVTYGEHVFDFGKPFEKLTMREAIKKYRPETDMADLDNFDAAKALAESIGITVEKSWGLGRIVTEIFDEVAEAHLIQPTFITEYPAEVSPLARRNDVNPEITDRFEFFIGGREIGNGFSELNDAEDQAERFQEQVNAKAAGDDEAMFYDEDYVTALEYGLPPTAGLGIGIDRMIMLFTNSHTIRDVILFPAMRPQK

SEQ ID NO: 10454 - protein, 97 aa, Escherichia coli [sequence omitted]

SEQ ID NO: 10455 - protein, 419 aa, Escherichia coli
MAWNQPGNNGQDRDPWGSSKPGGNSEGNGNKGGRDQGPPDLDDIFRKLSKKLGGLGGGKGTGSGGGSSSQGPRPQLGGRVVTIAAAAIVIIWAASGFYTIKEAERGVVTRFGKFSHLVEPGLNWKPTFIDEVKPVNVEAVRELAASGVMLTSDENVVRVEMNVQYRVTNPEKYLYSVTSPDDSLRQATDSALRGVIGKYTMDRILTEGRTVIRSDTQRELEETIRPYDMGITLLDVNFQAARPPEEVKAAFDDAIAARENEQQYIREAEAYTNEVQPRANGQAQRILEEARAYKAQTILEAQGEVARFAKLLPEYKAAPEITRERLYIETMEKVLGNTRKVLVNDKGGNLMVLPLDQMLKGGNAPAAKSDNGASNLLRLPPASSSTTSGASNTSSTSQGDIMDQRRANAQRNDYQRQGE

SEQ ID NO: 10456 - protein, 432 aa, Escherichia coli
MGNNVVVLGTQWGDEGKGKIVDLLTERAKYVVRYQGGHNAGHTLVINGEKTVLHLIPSGILRENVTSIIGNGVVLSPAALMKEMKELEDRGIPVRERLLLSEACPLILDYHVALDNAREKARGAKAIGTTGRGIGPAYEDKVARRGLRVGDLFDKETFAEKLKEVMEYHNFQLVNYYKAEAVDYQKVLDDTMAVADILTSMVVDVSDLLDQARQRGDFVMFEGAQGTLLDIDHGTYPYVTSSNTTAGGVATGSGLGPRYVDYVLGILKAYSTRVGAGPFPTELFDETGEFLCKQGNEFGATTGRRRRTGWLDTVAVRRAVQLNSLSGFCLTKLDVLDGLKEVKLCVAYRMPDGREVTTTPLAADDWKGVEPIYETMPGWSESTFGVKDRSGLPQAALNYIKRIEELTGVPIDIISTGPDRTETMILRDPFDA

SEQ ID NO: 10457 - protein, 484 aa, Escherichia coli
MHNIPGVWNTRLPLLQEIVMEILYNIFTVFFNQVMTNAPLLLGIVTCLGYILLRKSVSVIIKGTIKTIIGFMLLQAGSGILTSTFKPVVAKMSEVYGINGAISDTYASMMATIDRMGDAYSWVGYAVLLALALNICYVLLRRITGIRTIMLTGHIMFQQAGLIAVTLFIFGYSMWTTIICTAILVSLYWGITSNMMYKPTQEVTDGCGFSIGHQQQFASWIAYKVAPFLGKKEESVEDLKLPGWLNIFHDNIVSTAIVMTIFFGAILLSFGIDTVQAMAGKVHWTVYILQTGFSFAVAIFIITQGVRMFVAELSEAFNGISQRLIPGAVLAIDCAAIYSFAPNAVVWGFMWGTIGQLIAVGILVACGSSILIIPGFIPMFFSNATIGVFANHFGGWRAALKICLVMGMIEIFGCVWAVKLTGMSAWMGMADWSILAPPMMQGFFSIGIAFMAVIIVIALAYMFFAGRALRAEEDAEKQLAEQSA

SEQ ID NO: 10458 - protein, 131 aa, Escherichia coli
MRHYEIVFMVHPDQSEQVPGMIERYTAAITGAEGKIHRLEDWGRRQLAYPINKLHKAHYVLMNVEAPQEVIDELETTFRFNDAVIRSMVMRTKHAVTEASPMVKAKDERRERRDDFANETADDAEAGDSEE

SEQ ID NO: 10459 - protein, 75 aa, Escherichia coli
MARYFRRRKFCRFTAEGVQEIDYKDIATLKNYITESGKIVPSRITGTRAKYQRQLARAIKRARYLSLLPYTDRHQ

SEQ ID NO: 10460 - protein, 149 aa, Escherichia coli [sequence omitted]

SEQ ID NO: 10461 - protein, 220 aa, Escherichia coli
MAYRDQPLGELALSIPRASALFRKYDMDYCCGGKQTLARAAARKELDVEVIEAELAKLAEQPIEKDWRSAPLAEIIDHIIVRYHDRHREQLPELILQATKVERVHADKPSVPKGLTKYLTMLHEELSSHMMKEEQILFPMIKQGMGSQAMGPISVMESEHDEAGELLEVIKHTTNNVTPPPEACTTWKAMYNGINELIDDLMDHISLENNVLFPRALAGE

SEQ ID NO: 10462 - protein, 341 aa, Escherichia coli
MMPQSLPDTTTPKRRFRWPTGMPQLVALLLVLLVDSLVAPHFWQVVLQDGRLFGSPIDILNRAAPVALLAIGMTLVIATGGIDLSVGAVMAIAGATTAAMTVAGFSLPIVLLSALGTGILAGLWNGILVAILKIQPFVATLILMVAGRGVAQLITAGQIVTFNSPDLSWFGSGSLLFLPTPVIIAVLTLILFWLLTRKTALGMFIEAVGINIRAAKNAGVNTRIIVMLTYVLSGLCAAIAGIIVAADIRGADANNAGLWLELDAILAVVIGGGSLMGGRFNLLLSVVGALIIQGMNTGILLSGFPPEMNQVVKAVVVLCVLIVQSQRFISLIKGVRSRDKT

SEQ ID NO: 10463 - protein, 183 aa, Escherichia coli
MTKQPEDWLDDVPGDDIEDEDDEIIWVSKSEIKRDAEELKRLGAEIVDLGKNALDKIPLDADLRAAIELAQRIKMEGRRRQLQLIGKMLRQRDVEPIRQALDKLKNRHNQQVVLFHKLENLRDRLIDQGDDAIAEVLNLWPDADRQQLRTLIRNAKKEKEGNKPPKSARQIFQYLRELAENEG

SEQ ID NO: 10464 - protein, 551 aa, Escherichia coli
MTHLPHWWQNGVIYQIYPKSFQDTTGSGTGDLRGVIQHLDYLHKLGVDAIWLTPFYVSPQVDNGYDVANYTAIDPTYGTLDDFDELVTQAKSRGIRIILDMVFNHTSTQHAWFREALNKESPYRQFYIWRDGEPETPPNNWRSKFGGSAWRWHAESEQYYLHLFAPEQADLNWENPAVRAELKKVCEFWADRGVDGLRLDVVNLISKDPRFPEDLDGDGRRFYTDGPRAHEFLHEMNRDVFTPRGLMTVGEMSSTSLEHCQRYAALTGSELSMTFNFHHLKVDYPGGEKWTLAKPDFVALKTLFRHWQQGMHNVAWNALFWCNHDQPRIVSRFGDEGEYRVPAAKMLAMVLHGMQGTPYIYQGEEIGMTNPHFTRITDYRDVESLNMFAELRNDGRDADELLAILASKSRDNSRTPMQWSNGDNAGFTAGEPWIGLGDNYQQINVEAALADDSSVFYTYQKLIALRKQEAILTWGNYQDLLPNSPVLWCYRREWKGQTLLVIANLSREIQPWQAGQMRGNWQLVMHNYEEASPQPCAMNLRPFEAVWWLQK

SEQ ID NO: 10465 - protein, 951 aa, Escherichia coli
MEKTYNPQDIEQPLYEHWEKQGYFKPNGDESQESFCIMIPPPNVTGSLHMGHAFQQTIMDTMIRYQRMQGKNTLWQVGTDHAGIATQMVVERKIAAEEGKTRHDYGREAFIDKIWEWKAESGGTITRQMRRLGNSVDWERERFTMDEGLSNAVKEVFVRLYKEDLIYRGKRLVNWDPKLRTAISDLEVENRESKGSMWHIRYPLADGAKTADGKDYLVVATTRPETLLGDTGVAVNPEDPRYKDLIGKYVILPLVNRRIPIVGDEHADMEKGTGCVKITPAHDFNDYEVGKRHALPMINILTFDGDIRESAQVFDTKGNESDVYSSEIPAEFQKLERFAARKAVVAAVDALGLLEEIKPHDLTVPYGDRGGVVIEPMLTDQWYVRADVLAKPAVEAVENGDIQFVPKQYENMYFSWMRDIQDWCISRQLWWGHRIPAWYDEAGNVYVGRNEDEVRKENNLGADVVLRQDEDVLDTWFSSALWTFSTLGWPENTDALRQFHPTSVMVSGFDIIFFWIARMIMMTMHFIKDENGKPQVPFHTVYMTGLIRDDEGQKMSKSKGNVIDPLDMVDGISLPELLEKRTGNMMQPQLADKIRKRTEKQFPNGIEPHGTDALRFTLAALASTGRDINWDMKRLEGYRNFCNKLWNASRFVLMNTEGQDCGFNGGEMTLSLADRWILAEFNQTIKAYREALDSFRFDIAAGILYEFTWNQFCDWYLELTKPVMNGGTEAELRGTRHTLVTVLEGLLRLAHPIIPFITETIWQRVKVLCGITADTIMLQPFPQYDASQVDEAALADTEWLKQAIVAVRNIRAEMNIAPGKPLELLLRGCSADAERRVNENRGFLQTLARLESITVLPADDKGPVSVTKIIDGAELLIPMAGLINKEDELARLAKEVAKIEGEISRIENKLANEGFVARAPEAVIAKEREKLEGYAEAKAKLIEQQAVIAAL

SEQ ID NO: 10466 - protein, 503 aa, Escherichia coli
MEFSVKSGSPEKQRSACIVVGVFEPRRLSPIAEQLDKISDGYISALLRRGELEGKPGQTLLLHHVPNVLSERILLIGCGKERELDERQYKQVIQKTINTLNDTGSMEAVCFLTELHVKGRNNYWKVRQAVETAKETLYSFDQLKTNKSEPRRPLRKMVFNVPTRRELTSGERAIQHGLAIAAGIKAAKDLGNMPPNICNAAYLASQARQLADSYSKNVITRVIGEQQMKELGMHSYLAVGQGSQNESLMSVIEYKGNASEDARPIVLVGKGLTFDSGGISIKPSEGMDEMKYDMCGAAAVYGVMRMVAELQLPINVIGVLAGCENMPGGRAYRPGDVLTTMSGQTVEVLNTDAEGRLVLCDVLTYVERFEPEAVIDVATLTGACVIALGHHITGLMANHNPLAHELIAASEQSGDRAWRLPLGDEYQEQLESNFADMANIGGRPGGAITAGCFLSRFTRKYNWAHLDIAGTAWRSGKAKGATGRPVALLAQFLLNRAGFNGEE

SEQ ID NO: 10467 - protein, 425 aa, Escherichia coli
MLRLPNIYFKGYIRITQETNMATAWYKQVNPPQRKALFSAWLGYVFDGFDFMMIFYILHIIKADLGITDIQATLIGTVAFIARPIGGGFFGAMADKYGRKPMMMWAIFIYSVGTGLSGIATNLYMLAVCRFIVGLGMSGEYACASTYAVESWPKNLQSKASAFLVSGFSVGNIIAAQIIPQFAEVYGWRNSFFIGLLPVLLVLWIRKSAPESQEWIEDKYKDKSTFLSVFRKPHLSISMIVFLVCFCLFGANWPINGLLPSYLADNGVNTVVISTLMTIAGLGTLTGTIFFGFVGDKIGVKKAFVVGLITSFIFLCPLFFISVKNSSLIGLCLFGLMFTNLGIAGLVPKFIYDYFPTKLRGLGTGLIYNLGATGGMAAPVLATYISGYYGLGVSLFIVTVAFSALLILLVGFDIPGKIYKLSVAK

SEQ ID NO: 10468 - protein, 318 aa, Escherichia coli
MKIALVIFITLALAGCALLSLHMGVIPVPWRALLTDWQAGHEHYYVLMEYRLPRLLLALFVGAALAVAGVLIQGIVRNPLASPDILGVNHAASLASVGALLLMPSLPVMVLPLLAFAGGMAGLILLKMLAKTHQPMKLALTGVALSACWASLTDYLMLSRPQDVNNALLWLTGSLWGRDWSFVKIAIPLMILFLPLSLSFCRDLDLLALGDARATTLGVSVPHTRFWALLLAVAMTSTGVAACGPISFIGLVVPHMMRSITGGRHRRLLPVSALTGALLLVVADLLARIIHPPLELPVGVLTAIIGAPWFVWLLVRMR

SEQ ID NO: 10469 - protein, 302 aa, Escherichia coli
MIMLAFIRFLFAGLLLVISHAFAATVQDEHGTFTLEKTPQRIVVLELSFADALAAVDVIPIGIADDNDAKRILPEVRAHLKPWQSVGTRAQPSLEAIAALKPDLIIADSSRHAGVYIALQQIAPVLLLKSRNETYAENLQSAAIIGEMVGKKREMQARLEQHKERMAQWASQLPKGTRVAFGTSREQQFNLHTQETWTGSVLASLGLNVPAAMAGASMPSIGLEQLLAVNPAWLLVAHYREESIVKRWQQDPLWQMLTAAQKQQVASVDSNTWARMRGIFAAERIAADTVKIFHHQPLTVVK

SEQ ID NO: 10470 - protein, 317 aa, Escherichia coli
MNPLLTDSRRQALRSASHWYAVLSGERVSPQQEARWQQWYEQDQDNQWAWQQVENLRNQLGGVPGDVASRALHDTRLTRRHVMKGLLLLLGAGGGWQLWQSETGEGLRADYRTAKGTVSRQQLEDGSLLTLNTQSAADVRFDAHQRTVRLWYGEIAITTAKDALQRPFRVLTRQGQLTALGTEFTVRQQDNFTQLDVQQHAVEVLLASAPAQKRIVNAGESLQFSASEFGAVKPLDDESTSWTKDILSFSDKPLGEVIATLTRYRNGVLRCDPAVAGLRLSGTFPLKNTDAILNVIAQTLPVKIQSITRYWINISPL

SEQ ID NO: 10471 - protein, 173 aa, Escherichia coli
MSDRATTTASLTFESLYGTHHGWLKSWLTRKLQSAFDADDIAQDTFLRVMVSETLSTIRDPRSFLCTIAKRVMVDLFRRNALEKAYLEMLALMPEGGAPSPEERESQLETLQLLDSMLDGLNGKTREAFLLSQLDGLTYSEIAHKLGVSISSVKKYVAKAVEHCLLFRLEYGL

SEQ ID NO: 10472 - protein, 182 aa, Escherichia coli
MKIKTLAIVVLSALSLSSTAALAAATTVNGGTVHFKGEVVNAACAVDAGSVDQTVQLGQVRTASLAQEGATSSAVGFNIQLNDCDTNVASKAAVAFLGTAIDAGHTNVLALQSSAAGSATNVGVQILDRTGAALTLDGATFSSETTLNNGTNTIPFQARYFATGAATPGAANADATFKVQYQ

SEQ ID NO: 10473 - protein, 529 aa, Escherichia coli
MNNNDLVAKLWKLCDNLRDGGVSYQNYVNELASLLFLKMCKETGQEAEYLPEGYRWDDLKSRIGQEQLQFYRKMLVHLGEDDKKLVQAVFHNVSTTITEPKQITALVSNMDSLDWYNGAHGKSRDDFGDMYEGLLQKNANETKSGAGQYFTPRPLIKTIIHLLKPQPREVVQDPAAGTAGFLIEADRYVKSQTNDLDDLDGDTQDFQIHRAFIGLELVPGTRRLALMNCLLHDIEGNLDHGGAIRLGNTLGSDGENLPKAHIVATNPPFGSAAGTNITRTFVHPTSNKQLCFMQHIIETLHPGGRAAVVVPDNVLFEGGKGTDIRRDLMDKCHLHTILRLPTGIFYAQGVKTNVLFFTKGTVANPNQDKNCTDDVWVYDLRTNMPSFGKRTPFTDEHLQPFERVYGEDPHGLSPRTEGEWSFNAEETEVADSEENKNTDQHLATSRWRKFSREWIRTAKSDSLDISWLKDKDSIDADSLPEPDVLAAEAMGELVQALSELDALMRELGASDEADLQRQLLEEAFGGVKE

SEQ ID NO: 10474 - protein, 343 aa, Escherichia coli
MSAFTPASEVLLRHSDDFEQSRILFAGDLQDDLPARLDTAASRAHTQQFHHWQVLSRQMGDNARFSLVATADDVADCDTLIYYWPKNKPEAQFQLMNLLSLLPVGTDIFVVGENRSGVRSAEQMLADYAPLNKVDSARRCGLYFGRLEKQPVFDAEKFWGEYSVDGLTVKTLPGVFSRDGLDVGSQLLLSTLTPHTKGKVLDVGCGAGVLSVAFARHSPKIRLTLCDVSAPAVEASRATLAANGVEGEVFASNVFSEVKGRFDMIISNPPFHDGMQTSLDAAQTLIRGAVRHLNSGGELRIVANAFLPYPDVLDETFGFHEVIAQTGRFKVYRAIMTRQAKKG

SEQ ID NO: 10475 - protein, 440 aa, Escherichia coli
MFLAQEIIRKKRDGHALSDEEIRFFINGIRDNTISEGQIAALAMTIFFHDMTMPERVSLTMAMRDSGTVLDWKSLHLNGPIVDKHSTGGVGDVTSLMLGPMVAACGGYIPMISGRGLGHTGGTLDKLESIPGFDIFPDDNRFREIIKDVGVAIIGQTSSLAPADKRFYATRDITATVDSIPLITASILAKKLAEGLDALVMDVKVGSGAFMPTYELSEALAEAIVGVANGAGVRTTALLTDMNQVLASSAGNAVEVREAVQFLTGEYRNPRLFDVTMALCVEMLISGKLAKDDAEARAKLQAVLDNGKAAEVFGRMVAAQKGPTDFVENYAKYLPTAMLTKAVYADTEGFVSEMDTRALGMAVVAMGGGRRQASDTIDYSVGFTDMARLGDQVDGQRPLAVIHAKDENNWQEAAKAVKAAIKLADKAPESTPTVYRRISE

SEQ ID NO: 10476 - protein, 460 aa, Escherichia coli
MAKAPKRAFVCNECGADYPRWQGQCSACHAWNTITEVRLAASPMVARNERLSGYAGSAGVAKVQKLSDISLEELPRFSTGFKEFDRVLGGGVVPGSAILIGGNPGAGKSTLLLQTLCKLAQQMKTLYVTGEESLQQVAMRAHRLGLPTDNLNMLSETSIEQICLIAEEEQPKLMVIDSIQVMHMADVQSSPGSVAQVRETAAYLTRFAKTRGVAIVMVGHVTKDGSLAGPKVLEHCIDCSVLLDGDADSRFRTLRSHKNRFGAVNELGVFAMTEQGLREVSNPSAIFLSRGDEVTSGSSVMVVWEGTRPLLVEIQALVDHSMMANPRRVAVGLEQNRLAILLAVLHRHGGLQMADQDVFVNVVGGVKVTETSADLALLLAMVSSLRDRPLPQDLVVFGEVGLAGEIRPVPSGQERISEAAKHGFRRAIVPAANVPKKAPEGMQIFGVKKLSDALSVFDDL

SEQ ID NO: 10477 - protein, 555 aa, Escherichia coli
MAQFVYTMHRVGKVVPPKRHILKNISLSFFPGAKIGVLGLNGAGKSTLLRIMAGIDKDIEGEARPQPDIKIGYLPQEPQLNPEHTVRESIEEAVSEVVNALKRLDEVYALYADPDADFDKLAAEQGRLEEIIQAHDGHNLNVQLERAADALRLPDWDAKIANLSGGERRRVALCRLLLEKPDMLLLDEPTNHLDAESVAWLERFLHDFEGTVVAITHDRYFLDNVAGWILELDRGEGIPWEGNYSSWLEQKDQRLAQEASQEAARRKSIEKELEWVRQGTKGRQSKGKARLARFEELNSTEYQKRNETNELFIPPGPRLGDKVLEVSNLRKSYGDRLLIDDLSFSIPKGAIVGIIGPNGAGKSTLFRMISGQEQPDSGTITLGETVKLASVDQFRDSMDNSKTVWEEVSGGLDIMKIGNTEMPSRAYVGRFNFKGVDQGKRVGELSGGERGRLHLAKLLQVGGNMLLLDEPTNDLDIETLRALENALLEFPGCAMVISHDRWFLDRIATHILDYQDEGKVEFFEGNFTEYEEYKKRTLGADALEPKRIKYKRIAK

SEQ ID NO: 10478 - protein, 473 aa, Enterococcus faecalis; identical to SEQ ID NO: 5008

SEQ ID NO: 10479 - protein, 137 aa, Enterococcus faecalis; identical to SEQ ID NO: 5023

SEQ ID NO: 10480 - protein, 156 aa, Enterococcus faecalis; identical to SEQ ID NO: 4867

SEQ ID NO: 10481 - protein, 693 aa, Enterococcus faecalis
MAREFSLEKTRNIGIMAHVDAGKTTTTERILYYTGKIHKIGETHEGASQMDWMEQEQERGITITSAATTAQWKGYRVNIIDTPGHVDFTIEVQRSLRVLDGAVTVLDSQSGVEPQTETVWRQATEYKVPRIVFCNKMDKIGADFFYSVESLHDRLQANAHPIQIPIGAEEDFTGIIDLIKMKAEIYTNDLGTDIQETDIPEDYLEKAQEWREKLVEAVAETDEDLMMKYLEGEEITEEELVAGIRQATINVEFFPVLAGSAFKNKGVQLMLDAVLDYLPSPLDIDAIKGIDTKTDEETTRPADDEAPFASLAFKVMTDPFVGRLTFFRVYSGVLESGSYVLNASKGKKERIGRILQMHANTRQEIDKVYSGDIAAAVGLKDTTTGDTLCALDAPVILESIEFPDPVIQVAVEPKSKADQDKMGVALQKLAEEDPSFRVETNVETGETVISGMGELHLDVLVDRMKREFKVEANVGAPQVSYRETFRAATKAEGKFVRQSGGKGQYGHVWVEFTPNEEVKGFEFENAIVGGVVPREYIPAVEKGLEDSMNNGVLAGYPLVDIKAKLYDGSYHDVDSNETAFRVAASMALKAAAKNANPVILEPMMKVTITVPEDYLGDIMGHVTSRRGRVEGMEAHGNSQIVNAMVPLAEMFGYATTLRSATQGRGTFMMVFDHYEDVPKSVQEEIIKKNGGNA

SEQ ID NO: 10482 - protein, 395 aa, Enterococcus faecalis; identical to SEQ ID NO: 4887

SEQ ID NO: 10483 - protein, 296 aa, Enterococcus faecalis; identical to SEQ ID NO: 4892

SEQ ID NO: 10484 - protein, 238 aa, Enterococcus faecalis
MERLQKAIAHAGVTSRRKAEELIVKGRVKVNGQVVKELGTQVSKQDTVEVDGVPIYQEEYGYYLFYKPRGVISAVSDDKGRKVVTDYFTDVTERIYPVGRLDYDTSGLLLLTNDGSFSQKLTHPKHEVDKVYVAKIKGVPTKRELLPLAKGIRIDGKRTAPANFQILSADIKTGSSVVELTIHEGRNHQVKKMFQAVGFPVQKLKRERYGELTLQGLRPGQYRDLTKKEISQLLNQAK

SEQ ID NO: 10485 - protein, 135 aa, Enterococcus faecalis
MALSKLDNLYRQVILDHSSHPHHHGTLDASSQTIELNNPTCGDVIELDVAIEDGVIKDIAFQGSGCSISTASASMMTDAVLGKTIAEATALAEDFSQLVQGNEVAEDEKLGDAAMLSGVAKFPPGLNCEPWVGNP

SEQ ID NO: 10486 - protein, 258 aa, Enterococcus faecalis
MKEITSTKNNQLKEWKKLYKKKYREELNQYIIEGFHLVEEAVKANADVQWILFNQRGQQEWGTWLAEQETEKLIFVSDEVLNSLSELPTSQGILAIVTLETQQEQSLSFKGGWLLLDNIQDPGNVGTMIRTADAAGLAGVILGKGTADIYNTKVLRSMQGSHYHLPVLQRELTEVVQAFKKQGLPVFGTELNEAAIAYYEQEAVENYALILGNEGSGVSPELLAETTKNLYIPMKGQAESLNVAIAAGVLMFYFENNQ

SEQ ID NO: 10487 - protein, 261 aa, Enterococcus faecalis
MAVISMKQFLEAGVHFGHQTRRWNPKMKKYIFTERNGIYIIDLQKTVKLVDAAYDYMKNVAEEGGVALFVGTKKQAQEAIKDEAIRAGQYYVNHRWLGGTLTNWDTIQKRIARLKKINAMEEDGTFEVLPKKEVAGLNKERERLEKFLGGIADMPRIPDVMYIVDPRKERIAVQEAHKLNIPIVAMVDTNCDPDEIDVVIPSNDDAIRAVKLITAKMADAFIEGNQGEDQATEELFVEETPEATSIEEIVDVVEGNNESAE

SEQ ID NO: 10488 - protein, 293 aa, Enterococcus faecalis
MADVTAKMVKELRDMTGVGMMDAKKALVKVEGDMEKAVDFLRENGMAKAAKKNDRIAAEGLANVATVGNVAAIVEVNSETDFVSKNEMFQDLVKDIATKVAENKPATMEEAMAIKTEKGTIESDLIEATTVIGEKISFRRFEVVEKADNAAFGAYLHMGGRIAVLTVIDGTTDEEVAKDVAMHIAAINPRYVNESQIPQEELEHEKAVLTEQALNEGKPANIVEKMVVGRLQKFKAEIALVDQPFVKDPDMTVEKFVASKGGEVKSFVRFEVGEGIEKREDNFADEVMSQMKN

SEQ ID NO: 10489 - protein, 185 aa, Enterococcus faecalis
MSKEVLATAKEKMTKAEESLRRELGQIRAGRANASLLDRIQVEYYGAPTPVNQLASINIPEARVLMITPFDKNSIADIEKAIQMSDIGISPTNDGNVIRLVIPQLTEERRKELAKDVKKEAENSKVAVRNVRRDAMDELKKAQKNGDITEDELRSFEKDVQKLTDDSIKNIDAITAEKEQELLEV

SEQ ID NO: 10490 - protein, 272 aa, Enterococcus faecalis
MSENGKTIKTSWRELYMSVLEIKNLHVSIEDKKILKGVDLTINTGEIHAIMGPNGTGKSTLSAAIMGNPNYEVTEGEILFDGVNVLDLEVDERARLGLFLAMQYPSEIPGITNAEFMRAAINAKRDEDNKMSVMQFLKKLDSKMELLNMPEEMAERYLNEGFSGGEKKRNEILQLLMLEPTFAILDEIDSGLDIDALKVVSKGVNEMRGENFGALIITHYQRLLNYITPDVVHIMMEGRVVKTGGADLAKRLETEGYAGISQELGIDYKEEA

SEQ ID NO: 10491 - protein, 880 aa, Enterococcus faecalis
MKELTSSQVRQMYLDFFKSKGHSVEPSASLVPVNDPTLLWINSGVATLKKYFDGSVVPENPRITNAQKSIRTNDIENVGKTARHHTMFEMLGNFSIGDYFKNEAIHWAWEFLTGAEWLAFDPEKLYVTVYPKDTEAKRIWRDEVGLSEDHIIDVEDNFWDIGAGPSGPDTEIFYDRGEEFLDIPEDDPENYPGGENERYLEIWNLVFSEFNHTPEDTYEPLPHKNIDTGMGLERVVSIIQDAPTNFETDLFMPIIHAVEALGTNVKYGDAPQTDVSFKVIADHIRALSFAIGDGALPSNEGRGYVLRRLLRRAVMHGKKLGINEAFLYKLVPVVGEIMVSYYPEVLQQKDFIEKVVRTEEERFHETINEGLSMLNEVIKEVKDAKGDTLDGKIIFKLYDTFGFPVELTEEVAEDEGLKVDHAGFETEMEAQRERARSARSKETSMGVQSALLTDIKVESKFVGYTELTHDSELFVIIQGDALVNEASAGTAELIFAETPFYAEMGGQIADRGYVKNTAGEVVANVVDVKKAPNGQFLHKVEVLAPLAEGQIYQLQVDERMRTRILKNHTATHLLHRALKDVLGEHANQAGSLVAPGHLRFDFTHFGQVTSEELARMEAIVNEKIWEAIPVVTIETDIDTAKNMGAMALFGEKYGKEVRVVNIGDYSIELCGGTHVANTEDIGIFKIVSESGIGAGVRRIEAVTSKEAYQLLQEEERQLKEIATLVKSPQLKEVVTKTEQLQQQLRDLQKENEQLAGKLANQQAGDIFKDVKDINGVRYIAAQVNVKDMNQLRQLADQWKQKELSDVLVLATAQDEKVSLLAAMTKDMNGKGLKAGDLIKAIAPKVGGGGGGRPDMAQAGGKNPAGIADALAEVENWLANA

SEQ ID NO: 10492 - protein, 417 aa, Enterococcus faecalis
MYENLLPRFLRYVKTETRSDATSTTTPSTQTQVAFAQTLKKELEELGMSDVIYNETNGFVIATLPSNVEKDVRSIGFIAHMDTADFNAVNVSPQIVENYDGESTIPLDKEGKFTLNTKDFPNLKNYRGETLITTDGTTLLGADDKSGIAEIMTAMEYLINHPEIKHGTIRVAFGPDEEIGVGADKFDVAQFNVDFAYTMDGGPVGELQFETFNAAQAEITIQGKNVHPGTAKNTMINALQLGIDFHNALPADEVPEKTAGEEGFYHLAAFAGTPEEATMTYIIRDHNREIFEARKAKIKEIQQTLNAPFDEERIKVDLFDQYYNMREVIEKDMSIVEIAKQAMEELSIQPIIEPVRGGTDGSKISYLGIPTPNIFAGGENMHGRFEFVSLQAMEKATNVIIKIAELYAKLMRHLIGK

SEQ ID NO: 10493 - protein, 452 aa, Enterococcus faecalis
MRQVPSFKQFQFQPFINEALAEKGFEEPTEVQEKLIPIIKKGKSVIGQSQTGSGKTHTFLLPLMDKVKPTIDEVQIVITAPSRELANQIYQEAQQLARFSQPEIRVSNFVGGTDKQRQLNKLKHQQPHVVIGTPGRILDMMNEQALKVHTAFAFVVDEADMTLDMGFLAEVDQIAGRLPEKLQMLVFSATIPEKLRPFLKKYLENPVIEHIKPKAVISETIDNWLISTKGKNSNQIIYQLLTIGHPYLAIVFANTKQRVDEITDYLKDQGLKVAKIHGDITPRERKRVMRQVQNLDYQYVVATDLAARGIDIEGVSHVINAEVPHELDFFIHRVGRTGRNGLNGTAITLYSPADDEAITQIEQLGVSFKPKEIKNGEIVETYDRNRRTKREKSREELDPTLIGLVKKKKKKIKPGYKKKINWAIEDSNKKKRKIERRQKDRSARKAKKNSSN

SEQ ID NO: 10494 - protein, 722 aa, Enterococcus faecalis
MTVNEVCGSGMKAVILAKQLIQLGEAEVLIAGGIENMSQAPKLQRFNYETESYDAPFSSMMYDGLTDAFSGQAMGLTAENVAEKYHVTREEQDQFSVHSQLKAAQAQAEGIFADEIAPLEVSGTLVEKDEGIRPNSSVEKLGTLKTVFKEDGTVTAGNASTINDGASALIIASQEYAEAHGLPYLAIIRDSVEVGIDPAYMGISPIKAIQKLLARNQLTTEEIDLYEINEAFAATSIVVQRELALPEEKVNIYGGGISLGHAIGATGARLLTSLSYQLNQKEKKYGVASLCIGGGLGLAMLLERPQQKKNSRFYQMSPEERLASLLNEGQISADTKKEFENTALSSQIANHMIENQISETEVPMGVGLHLTVDETDYLVPMATEEPSVIAALSNGAKIAQGFKTVNQQRLMRGQIVFYDVADAESLIDELQVRETEIFQQAELSYPSIVKRGGGLRDLQYRAFDESFVSVDFLVDVKDAMGANIVNAMLEGVAELFREWFAEQKILFSILSNYATESVVTMKTAIPVSRLSKGSNGREIAEKIVLASRYASLDPYRAVTHNKGIMNGIEAVVLATGNDTRAVSASCHAFAVKEGRYQGLTSWTLDGEQLIGEISVPLALATVGGATKVLPKSQAAADLLAVTDAKELSRVVAAVGLAQNLAALRALVSEGIQKGHMALQARSLAMTVGATGKEVEAVAQQLKRQKTMNQDRALAILNDLRKQ

SEQ ID NO: 10495 - protein, 371 aa, Enterococcus faecalis
MAKAKKQKPIDFKELMAKVDADFPTFQILDQDGKIVNEDLVPDLSDEELVELMTRMVWSRVLDQRSTALNRQGRLGFFAPTAGQEASQLASQFAMEKEDYLLPGYRDVPQLVQHGLPLREAFLWSRGHVAGNYYAEDLNALPPQIIIGAQYIQAAGVALGLKKRGKENVVFTYTGDGGSSQGDFYEAINFAGAYQANGVFIIQNNGFAISTPREKQTAAKTLAQKAVAAGIPGIQVDGMDPLAVYAIAKEARDWSAAGNGPVLIETLTYRYGPHTLSGDDPTRYRSKEMDDEWVQKDPLTRFRKYLTDKGLWSEAKEEEIIEKTKEEIKVAIAEADKAPKQKVSDFLKNMFEVQPQTIKEQIAFYEAKESK

SEQ ID NO: 10496 - protein, 325 aa, Enterococcus faecalis
MAQKTMIQAITDALALELEKDENVLIFGEDVGNNGGVFRATEGLQEKFGEDRVFDTPLAESGIGGLAFGLALQGYRPVPEIQFFGFVFEVFDEIVGQMARTRYRMGGTRNMPITVRAPFGGGVHTPELHSDNLEGLIAQSPGVRVVIPSNPYDAKGLLISSIRSNDPVVYLEHMKLYRSFREEVPDEAYEVPLDKAAVTREGTDVSIITYGAMVREAIKAADSLAKDNISAEIIDLRTVAPLDVETIINSVEKTGRVVVVQEAQKQAGVGAMVVSEISERAVLSLEAPIGRVSAPDTIFPFGQAENIWLPNAKDIEAKAREIVEF

SEQ ID NO: 10497 - protein, 539 aa, Enterococcus faecalis
MAYQFKLPDIGEGIAEGEIVKWFVKPGDTINEDDTLLEVQNDKSVEEIPSPVTGTVKNIVVPEGTVANVGDVLIEIDAPGHEDNDAAPAAPAQEQTPAQPAAVPTTEAAGGFFQFKLPDIGEGIAEGEIVKWFVKAGDTINEDDSLLEVQNDKSVEEIPSPVTGTVKNIVVPEGTVANVGDVLVEIDAPGHNSAAPAAAAPATDAPKAEASAPAASTGVVAAADPNKRVLAMPSVRQYAREKDVDITQVTATGKGGRVIKADIDAFVSGGSQAAPATEAAATEAAPKAEAAAPKAAPKAFTSDLGEMETREKMTPTRKAIAKAMVNSKHTAPHVTLHDEVEVSKLWDHRKKFKDVAAANGTKLTFLPYVVKALTSTVQKFPILNASIDDAAQEIVYKNYFNIGIATDTDHGLYVPNVKNANTKSMFAIADEINEKAALAIEGKLTAQDMRDGTITISNIGSVGGGWFTPVINYPEVAILGVGTIAQEPVVNADGEIVVGRMMKLSLSFDHRIVDGATAQKAMNNIKRLLADPELLLMEG

SEQ ID NO: 10498 - protein, 468 aa, Enterococcus faecalis
MVVGDFAIELDTVVIGAGPGGYVAAIRAAEMGQKVAIIEREYIGGVCLNVGCIPSKALIAAGHHYQEAQDSSTFGVTAKGVELDFAKTQDWKDNTVVKSLTGGVGMLLKKHKVEIIEGEAFFVDENTLRVIHPDSAQTYSFNNAIVATGSRPIEIPGFKFGGRVLDSTGGLNLKEVPKKFVIIGGGVIGAELGGAYANLGSEVTILEGSPSILPTYEKDMVKVVTDDFKKKNVTIVTSAMAKEAVDNGDSVTVKYEVNGKEESVEADYVMVTVGRRPNTDDLGLEQAGVEIGERGLIPVDNQGRTNVKNIFAIGDIVPGAALAHKASYEAKIAAEAISGKKVAVDYKAMPAVAFTDPELASVGMTVAEAKEAGIEAKGYKFPFAGNGRAISLDKTEGFMRLVTTVEDNVIIGAQIAGVGASDMISELALAIESGMNAEDIALTIHPHPSLGEITMDTAELALGLPIHI

SEQ ID NO: 10499 - protein, 550 aa, Enterococcus faecalis
MKKLKMMGIMLFVSTVLVGCGTTAETKRDEKATEKTSVSKKVLNLMENSEIGSMDSIFTQDEASINAQSNVFEGLYQLDEKDQLIPAAAKEMPEISEDGKRYTIKLREDGKWSNGDAVTANDFVFAWRKLANPKNQANYFFLLEGTILNGTAITKEEKAPEELGVKALDDYTLEVTLEKPVPYFTSLLAFSPFFPQNEAFVKEKAKAYGTSSKMIESNGPFLMKNWDQSAMSWDFVRNPDYYDKEKVKSETIHFEVLKETNTVYNLYESGELDVAVLTGDFAKQNRDNPDYEAIERSKVYSLRLNQKRNEKPSIFANENVRKALAYALDKKSLVDNILADGSKEIYGYIPEKFVYNPETNEDFRQEAGALVKTDAKKAKEYLDKAKAELNGDVAIELLSRDGDSDRKVAEFIQGQLQETLPGLTINVKTVPLNNAIELMRKGDYELSVGMWGPDYQDPMTFLESSVSGNRMNYSSPTFDQLIEEATTKYANDPETRWQTLIKAEKVLVEEDAALIPLYQEARSQLIRPGVKGIQYHNFGATSTYKYAYKE

SEQ ID NO: 10500 - protein, 551 aa, Enterococcus faecalis
MDNNVFVGIVAGLVAAAMYNRFSGVKLPMALSFFSGKRLVPIMSAISMLAISAVLFFFWPVVYNGLVAFGKGISSLGFVGAGLYGFFNRLLIPTGLHHALNSVFWFDVAGINDIGNFLAGQQALDTGKAIVGQTGMYQAGFFPVMMFGLPAGAFAIYQCARPEKKKVTASLMLAAGFAAFFTGVTEPLEFSFMFVAWPLYVLHAVFTGISLAFAEFMHWTAGFAFSAGFVDFFLSLKNPVANHPMMLVVQGLVFAAIYYFGFRFAITKFNLMTPGREEGDGEETPDVAEGDNKFASLARRIYDGLGADANVTSIDNCTTRLRLTVKDTGKVDQAKIKATGVPGVKVIDDTNIQVIVGTEVQFVADEMQRLYNHQAPATPVKETPVSQPVVEKKAPVSTKETELYSVANGKVIPISEVPDDVFSAKMMGDGFAVVPTDGKVSTPVAGKITSIFPTKHALGIQTDSGIEVLLHMGLDTVELQGGPFTLHVEEGQVVKQGDKIATIDLAALEQAGKKSDLIVVFTNQDIVAQYDLQKAGQTTSMNDVIGNVTVK

SEQ ID NO: 10501 - protein, 438 aa, Enterococcus faecalis
MSMFLDQVTIDVKAGKGGDGMVAFRREKYVPDGGPAGGDGGRGGDVVLVVEEGLRTLMDFRFNRHFKATPGENGMSKGMHGRGSEDLLVKVPPGTTVRDAETGALIGDLIENGQTLVVAKGGRGGRGNIRFASPRNPAPEIAENGEPGQERKIELELKVLADVGLVGFPSVGKSTLLSVISSARPKIGAYHFTTLVPNLGMVTTSDGRSFAAADLPGLIEGASQGVGLGTQFLRHIERTRVILHVIDMSGMEGRDPYEDYLAINKELASHNLRLMERPQIIVANKMDMPEAEENLAKFKEQLAKERTDEYADELPIFPISGVTRKGIEPLLNATADLLEVTPEFPLYEDEVVEEETVRYGFQPEGPEFTIDREPDASWVLSGEKLEKLFEMTNFDHDETVMRFARQLRGMGVDEALRARGAKDGDIVRIGNFEFEFVE

SEQ ID NO: 10502 - protein, 382 aa, Enterococcus faecalis
MTKKFVLAPDSFKESMSAKEACLAMEKGILAVFKDADIQHVPMADGGEGTVDSLVDATGGTRVPVRVAGPLPDQIVETYYGLLGDQETVVIEMAKANGIELVKAAERNPLITSTYGTGEMIQHALNHGAKKIIIGIGGSVTNDGGAGMIQALGARLLDKEGQELTRGGGALDKLAQIDLTQFDQRIFATEVLVASDVNNPLTGPTGASHVFGPQKGATEEMVAQLDKNLAHYAAIIKKEVGIDVEMMPGAGAAGGLGAGLLAFTKAQLRPGIDIVVEVNQLEEKIKAADYVFTGEGGMDFQTKFGKAPYGVSRLAKKYQKPVFACAGYIGKDVDVLYEEGMTAIFGILAKAEPLEAALKNGPVNLERTVENIARTLQLVPCD

SEQ ID NO: 10503 - protein, 569 aa, Enterococcus faecalis
MNKYQLPVASWVESFTDWLTSTFAGLFSFLQTIGQSVMDNITALLTAVPPLVLIVLLTIAAFFISNKKIGLSLFTFIGLMFIYNQNLWNDLMSTVTLVLLSSVISIIIGVPLGILMAKSEKAKSIITPILDFMQTMPGFVYLIPAVAFFGIGMVPGVFASVIFALPPTVRFTNLGIRQVPNELVEAADSYGSTGWQKLFKLELPLAKNTIMAGVNQTTMLALSMVVIASMIGAPGLGRGVLSALQRAQVGNGFVNGVALVILAIIIDRFTQHLNNKKAAPKAAGATSKKKKYGIIAAVVVIVAGLVGASIFTTTNDKQISLSYVEWDTEVASTHVVAEVLKDMGYDVKTTPLDNAIMWESVAKGETDAMVGAWLPGTHAEQYKQYKDKLDDLGENLKGAKLGIVVPSYMDVDSIEDLSDQAGKKITGIEPGAGVVAAAEKTKEAYPNLKDWSVETSSSGAMTVALGQAIKNNEDIVITGWSPHWMFAKYDLKYLADPKGTMGGEEAIHTMARQGLKEDQPEAYKVLDNFHWTTKDMESVMLEINEGKDPQEAARDWVDSHKDQVAEWKK

SEQ ID NO: 10504 - protein, 648 aa, Enterococcus faecalis
MILLQANQVARHFGSETLFENIHLEIATKSRIALVGRNGAGKSTFLKIIAGIDAPDSGTIAKNKTATLGYLAQNTGLESDKTVWEEMTKAFADILEMEQRMRELETKISEMDPTTSVYEGILKEYDQLQHTFSEKNGYGYENEIRSVLHGFGFDESFYTKDIQTLSGGQKTRLALARMLLQKPDILILDEPTNHLDIETLSWLESYLPSYAGALLIVSHDRYFLDKVVNEVYELSRKKMTHYKGNYSKYLELKAEQLASEWKAYEKQQEEINKLEDFVAKNLVRASTTKRAQSRRKVLEKMDRLDRPQGDEKSAHFLFDSEKVSGNVVLQVEDAAIGYDQEHILSEPIHLDIRRKEAIALVGPNGIGKSTLLKSIIDRIPFIKGSKTFGTNVSVGYYDQEQANLHGNKTVLAELWDEHPTTPEKEIRSILGGFLFSGDDVEKTIPLLSGGEKARVALAKLAMDRDNFLILDEPTNHLDIDNKEVLENALIDYEGTILFVSHDRYFINRIATKVVELSEKGSKLYLGDYDYYLEKKQEEEEIAALLANEEAAKKPEPVTAKNTFYQNKEQQKLLRTLQRKITQVEENLAQLDTTIAQLEAQMSQPDILENHVELLALNQQLDDARQQQDELLEQWENFSLELEEMENNN

SEQ ID NO: 10505 - protein, 401 aa, Enterococcus faecalis
MYTFKIGIPAEVHDTFVKNHPLCNLLQSSSWAKVKDNWGSEIVGVYEKDTLVASSLVLIKPLPAGFTMLYTPRGPVMDYTNERLVSYFMAELKKFGKKKRALFIKMDPAVHYQDFHLGEEHQPHAEATAIIETLKEAGAKYQGLTMDMGATIQPRFQANIYREDFSEEQLSKSTKKMIKTAEKKGVVVQQGHVDFVDEFEKVIQSTMERQHISLRNSDYFKKLLNIYPEDSFIMLAQVNLKERLDSTRQRYDKNQKDLSNLKENQVKKRHNLEELDASLTRELKELEENIAEAGEIVTVAGALAVTFGPTSEILYAGLDDRYKRYMPTYVTWRDAIQECFNRGCESCNMGGLEGSLNDGLIKFKANFNPTINEFIGEFDLPVNKLLFKASEYAYKLRKQKK

SEQ ID NO: 10506 - protein, 94 aa, Enterococcus faecalis
MLKPLGDRVVIRVAKEEEKTVGGIVLASVAKEKPQTGEVIAVGEGRVLENGTKVPMEVKIGDTVMFEKYSGTEVKYEGVEYLIVSAKDIIATVE

SEQ ID NO: 10507 - protein, 494 aa, Enterococcus faecalis
MDYTYADDSLTLHTDMYQINMMQTYWELGRADLHAVFECYFREMPFNHGYAIFAGLERLVNYLENLTFTESDIAYLREVEEYPEDFLTYLANFEFKCTVRSALEGDLVFNNEPLIQIEGPLAQCQLVETALLNMVNFQTLIATKAARIKSVIGDDPLLEFGTRRAQELDAAIWGTRAAYIGGADATSNVRAGKIFGIPVSGTHAHSLVQSYGNDYEAFMAYAKTHRDCVFLVDTYDTLKAGVPSAIRVAREMGDKINFLGVRIDSGDMAYISKRVREQLDEAGFTEAKIYASNDLDENTILNLKMQKSKIDVWGVGTKLITAYDQPALGAVFKLVSIEGEDGQMKDTIKLSSNAEKVTTPGKKQVWRITRKSDKKSEGDYVTLWNEDPRQEEEIYMFHPVHTFINKYVRDFEARPVLQDIFVEGKRVYELPTLDEIKQYAKENLDSLWEEYKRDLNPQKYPVDLSTDCWNHKMNLLEKVRKDVKHLTETVNKEA

SEQ ID NO: 10508 - protein, 275 aa, Enterococcus faecalis
MTTLQEKIIQELGVLPTIDPKEEVRKSIDFLKAYLTKHPFLKTFVLGISGGQDSTLAGRLAQLAMTEMREETGDMSYQFIAIRLPYGEQADEADAQAALAFIQPDVSLRVDIKPAVDAMVGSLENAGVQISDFNKGNMKARQRMITQYAVAGENAGAVIGTDHAAENVTAFFTKYGDGGADILPLFRLNKRQGKALLKELGAPEALYLKIPTADLEDDKPLVADEVALGVTYDAIDDYLEGKKVSETDQQTIENWYKKGQHKRHLPITIFDDFWK

SEQ ID NO: 10509 - protein, 321 aa, Enterococcus faecalis
MATYYEAINWNAIEDVIDKSTWEKLTEQFWLDTRIPLSNDLDDWRTLSDLEKTTVGYVFGGLTLLDTVQSESGMDQLRNDVRTPHEEAVLNNIQFMESVHAKSYSSIFSTLNTKKEIDDIFEWTNTNKHLQYKAERINEIYKNGTPLEKKIASVFLETFLFYSGFYTPLYYLGNNKLANVAEIIKLIIRDESVHGTYIGYKFQLGFNELPEDEQDKLKDWMYNLLYELYENEERYTEELYDDLGWTEEVKTFLRYNANKALMNLGMDPLFADTANDVNPIVMNGISTGTSNHDFFSQVGNGYLLGTVEAMKDDDYLYGLDK

SEQ ID NO: 10510 - protein, 659 aa, Enterococcus faecalis
MKEDFIETEFIEKYSMDFIEKLYAFLDEQHFQFKSFMAAYKFYSQYALKNNAGTEYLETYEDRVAFNALYFADGDEELALTLADEMIHQRYQPATPSFLNAGRKRRGELVSCFLVQVTDDMNSIGRSINSALQLSRIGGGVGITLSNLREAGAPIKGYDGAASGVVPVMKLFEDSFSYSNQLGQRQGAGVVYLNVFHPDIEMFLSAKKENADEKIRVKTLSLGVIVPDKFYELTRNNEDMYLFSPYSVEREYGVPYSYVDITKEYDNLVANPNIRKRKIKARDLENEISKLQQESGYPYIINIDTANKNNPIDGKIIMSNLCSEILQVQTPSVINGKQEYEVLGTDISCNLGSTNIVNLMESPDFGKSVRAMTRALTFVTDASEIDVVPTIQNGNRLSHTIGLGAMGLHTFFAKNHMEYGSEESLDFTDIYFMLLNYWTLMESNQIAKERNQVFHNFEKSDYASGAYFDKYIEGNFTPKFDKVKEIFKDIQIPTAEDWAALRDAVKKDGLYHQNRLAVAPNGSISYINDTSASIHPITRMIEERQEKKIGKIYYPAPYLANDTIPYYTSAYDMDMRKVIDVYATAQQHVDQGMSLTLFMRSEIPEGLYEWKETPKQTTRDLNILRHYAFNKGIKSIYYIRTFTDDAEEIGSNQCESCVI

SEQ ID NO: 10511 - protein, 715 aa, Enterococcus faecalis
MHMNEDIKVIFDSIYRDKATNNLTITGWALDTITKESPTFTINNENQVSAYNIQRVLREDVNQIYQTEPAIEAGFVVTLEGIKQKKVLPFHFQSSAHVVTVDFPLNKKYPVIPGTEDKVTRLWIKAKKGFKYMAKNGISHTIQRAKIEKLRNQASYLNWLARNEVLDIEAMTQEIATFHYQPKISIAMPVYNVEEKWLRLCIDSILNQVYTNWELCMADDASTDPNVKKILTEYQQLDERIRVVFREQNGHISEATNSALAIATGEFVALLDNDDELAINAFYEVVKVLNENPELDLIYSDEDKIDMDGNRSDPAFKPDWSPDLLLGTNYISHLGVYRRSILEEIGGFRKGYEGSQDYDLVLRFTEKTTKERITHIPKVLYYWRMLPTSTAVDQGSKGYAFEAGLRAVQDALVRRGINGHATHGAANGLYDVYYDIESEKLVSIIIPTKNGYKDVQRCVSSIIEKTTYQNYEIIMADNGSTDPKMHELYAKFEQQLPGRFFVESIDIPFNFSTINNRAAKKAHGEYLLFLNNDTEVITENWLTLMVSFAQQERIGCVGAKLLYPNNTVQHAGVILGLGGVAGHGHYGYPHGDLGYFGRLAINVNYSAVTAACLLMKKADFDAVGGFEEAFTVAFNDVDLCLKVQALGRDNVWLHEAELYHFESQTRGYDDKGKKKKRFEQEKVMMEEKWGPLIENDPFYNPNLTRDIPNFSLRID

SEQ ID NO: 10512 - protein, 465 aa, Enterococcus faecalis
MTSKSEWSNARRIVIILADVLLYNLSIILGFMVKFGREIPSFNFVAYEKSAIYISIFFIFLNLLLGAYIFYNRKISDIIFVTVIGQILMTLTIMIVTFAGRWFTFPRSVLGYSFIIGIIVLSLWRILVYYLYLKVSNERKVVLLGKENQVMRSIQNFMSDKNNKHKVTSVVVSNYYENLKKIIDEIDIVYISSNVDENEKVKLYQLIVKHKKKIFLDTSFENLIMLKPNMMNFEDESIIEVSNFEIQPEENFIKRLFDILVSVCLFVITSPLMLIAAILVKATSPGPVIYKQTRITLDQREFSILKFRTMSATAEAKSGPVLSTSNDSRVTTVGKYLRALRIDELPQLINVIRGDMSIVGPRPERPFFVDQFNQENPNYYLRHNVRAGITGYAQVYGKYASDYNSKLNFDLLYIKNYSLLLDMKILLQTIKILFDKVSSRGLDESEERETITCSYLKERNIKLLK

SEQ ID NO: 10513 - protein, 134 aa, Enterococcus faecalis
MRQIITYGTFDLLHYGHINLLRRAKDRGDYLIVGLSTDEFNWDEKGKKTYFSFDKRKKLLEAIRYVDLVIPENSWQQKIQDIKEFHVAEFVIGDDWSGKFDFIANETNAEVIYLPRTPEISTTQIKKDLENKTF

SEQ ID NO: 10514 - protein, 451 aa, Enterococcus faecalis
MGIRPMTRKAKTAEEIKHIAEEENVRFLRLMFTDIMGTIKNVEVPVSQLDKVLDNKMMFDGSSIEGFVRIEESDMYLYPDLSTWMIFPWESDHGKVARLICDIYNPDGTPFAGDPRGNLKRALADMKELGFTSFNLGPEPEFFLFKLDENGEITTDLNDKGGYFDFAPTDLGENCRRDIVLELESLGFEVEASHHEVAPGQHEIDFKYADVVDACDNIQTFKLVVKTIARKHGLHATFMPKPLFGINGSGMHCNMSLFNEEGNVFYDESGEMGLSQTAYHFLGGLLKHARAYTAVCNPTVNSYKRLVPGYEAPVYVAWSGRNRSPLIRVPESRGLSTRLELRSVDPSANPYLTMAVLLQAGLDGIRNELTPPPAVDRNIYVMNEEERQHAQIEDLPSTLHNAIKELRKDQVMIDALGRHIFANFVEAKRMEWAAFRQTVSEWEREQYLELY

SEQ ID NO: 10515 - protein, 250 aa, Enterococcus faecalis
MFLQNKNVVVMGVANKKSIAWGCAKALKDQGANVIYTYQNERMKKQMVKLADENDLLVECDVASDASIQAAFETIKNEVGTIDGLVHAIAFAKKEELSGNVSDITRDGFLLAQDISSYSLLAVTHYAKPLLNPGSGIVTLTYLGSERAIPNYNMMGIAKASLETAVKYLAFELAADKIRVNGISAGAIKTLAVTGVKDYDQLISISNERTPDKTGVTIEEVGNTCAFLVSELASGVVGDIIYVDKGVHLT

SEQ ID NO: 10516 - protein, 412 aa, Enterococcus faecalis
MKRVVITGMGAVTPLGNTVKEFWHNLVDGKLGIGKITKFDSEDTGVALAGEVKEFDPSAVLERKEQKRMDLFSQYGLVAALEAWEMSGLTEATIDPTRLGVIVGSGIGGMTTLQDQVRVMDKKGAKRVTPFFVPMVIANMAAGNISIRLGAKGPSQTIVTACASATNAIGEAFRTIKYGLADMMVTGGTEATVCEIGIAGFAALNALNTTEDATRASIPFDKERKGFVMGEGAGMLVLEELEHAQKRGATIYGEIVGYGSNCDASHMTAPLKDGSGAAAAMEMAIAEAGITPEQIGYINAHGTSTPANDAAETTAIKRVFGERASQIPISSTKSMTGHLLGAAGGIEAIACVQTLQEGKAHPTVGYQVADPDCDLDYVTEGARDITADYTISNSFGFGGHNGVICLKKWEEN

SEQ ID NO: 10517 - protein, 144 aa, Enterococcus faecalis
MKKVMTATEIMEMIPNRYPICYIDYVDEIIPNEKIIATKNVTINEEFFQGHFPGNPTMPGVLIIEALAQVGSILILKMDQFEGETAYIGGINKAKFRQKVVPGDVLKLHFEIVKLRDFVGIGKATAYVEDKKVCECELTFIVGR

SEQ ID NO: 10518 - protein, 394 aa, Enterococcus faecalis
MTVIYQKIFILRRKTFMKFNTKLIHGGISKDTTTGAVSVPIYQTSTFEQNGVGQPKEYEYSRSGNPTRHALETLIAELEGGSHGFAFSSGLAGIHAIISMFGPEDHILLGDDVYGGSFRLLDKVFVANGLSYTIVNASDLSTIEAAIQPNTKALFLETPSNPLLKITDIEAAAKLAKKHQLLTIVDNTFATPYFQRPLALGADIVVHSGTKYLGGHSDVVSGLVVTNHPESAEKIAFLQNAIGAVLGPHDSWLVQRSLKTLGVRMAAHAQNAQKIAEFLEAHPAVATVYYPGLASHPGHEIAQKQMSGFSGMISFELAKDEQVVPFVEALEIFTLAESLGGVESLIEVPAIMTHASIPKENREAVGIKDGLIRLSVGIEAVEDLLADLEKGLQA

SEQ ID NO: 10519 - protein, 476 aa, Enterococcus faecalis
MSILKNDFLWGGAVAAHQLEGGWDQGGKGVSVADVMTAGAHGVPRKITAGVLPDEHYPNHEAIDFYHRYQEDIQLFKELGLNCFRTSIAWTRIFPNGDEETPNEEGLRFYDALFDECLKNGIEPVVTLSHFEMPYHLVTKYGGFRNRQVIDFFVKFAEVCFTRYQKKVKYWMTFNEINNQANYEEDFAPFTNSGIAYQEGEDREAIMYQAAHYELVASARAVKIGHAINPDFQIGCMIAMVPIYPYSCNPENMMMSVSAMQKRYWFTDVHVRGHYPSAIQCYLKRKNISLDVTKEDLTDLANGCVDYIGFSYYMSFAVKGAEKAPTFDYNEAKDLVRNPYVATSDWGWQIDPMGLRYAMNWFNDRYELPLFIVENGFGAIDELEPDGTINDTYRIAYLREHIEMMKEAVAYDGIDLMGYTPWGFIDLVSASTGEMKKRYGFIYVDKDNDGHGTLERRKKKSFAWYQQVIATNGEEL

SEQ ID NO: 10520 - protein, 831 aa, Enterococcus faecalis
MKKMESKTFDIEGMSCASCAQTIEKATAKLPGMAKASVNLATEKLSVTYDQTEVTEEEIKEAVSDAGYKAISPAQQRTFAIEGMSCASCAQTIEKAVNQLSGVQQAIVNLATEKLVVSYDDHQVTSAEIIKAVMDAGYQATEEVAAGATADQDREKKQKHIAEMWQRFWISAVFTVPLLYIAMGHMVGLPLPDFLNPMTHATTFAMVQLILTLPVLYVGREFFTVGFKALFKGHPNMFSLVALGTSAAFVYSLYGTVMIFLGDTSFTMALYYESAGVILTLITLGKYFEAVSKGKTSDAIKKLMGLAPKTAHILRDGAEIEVPVDAVQLDDIVIVRPGDKIPVDGVIVSGSSSVDEAMLTGESLPVEKKVGDAVIGASINKNGSFQFKATKVGKETALAQIIQLVEDAQGSKAPIAQLADKISGVFVPIVIGLAVLSGLAWFFLGQESWIFALTITISVLVIACPCALGLATPTAIMVGTGKGAENGVLIKSGDALETTHKIQTIVFDKTGTITEGKPVVTDILVADSALSEAELLTLAASAEQGSEHPLGEAIVGAAKERQLSLAEGSDFSAIPGHGIRVTVNERVLLLGNIKLMKEEAIELSTFVQQADRLAEEGKTPMFVAKDGSFAGIIAVADTVKDSSQTAIARLHKMGIEAVMITGDNKRTAEAIAKQVGIDRVLSEVLPEDKALEVKKLQAEGKKVAMVGDGINDAPALAQADVGIAIGSGTDVAMESADIVLMRSDLMDVPTAVELSKATIKNIKENLFWAFAYNTLGIPVAMGVLHLFGGPLLSPMIAAAAMSFSSVSVLLNALRLKGFKPSTVKKTSGSQK

SEQ ID NO: 10521 - protein, 129 aa, Enterococcus faecalis
MLLEIDEQSEQPIYQQLIDQIIVGIAKGELVPSESLPSIRQLADEIGVNMMTVSKAYNKLKQSGYIVTDRRNGTKIAAKLPATAVWQQQLHERLELLLAESFLHQQSEAEIQALIQKIYQNFDSKGRAL

SEQ ID NO: 10522 - protein, 206 aa, Enterococcus faecalis
MIHYNSNELSAKTAYKFLSGSIIPRPIAWVTTQDTATGVVNAAPFSFFNAAAAEIPLATLSILRPDKAPKDTARNILATKELVIHFVNEDVLTQMNQTSAPLAAEISEIDTFGIETIASQTVAVPAIKAAPIRMEARLHQYVPIANHEGQIITDLFIVEITDFYFDSAVFDEEHQYILPEKLQPIARLAGNDYTTLGEIREVRRPT

SEQ ID NO: 10523 - protein, 70 aa, Enterococcus faecalis
MRKWVVNRMKVKEIRELTTAEMLDKEKQLKEELFNLRFQLATGQLENTARIKEVRQSIARIKTVLREQAN

SEQ ID NO: 10524 - protein, 95 aa, Enterococcus faecalis
MEGGQTRMTEERNQRKVYQGRVVSDKMDKTITVVVETKKNHPIYGKRMKYSKKYKAHDENNTAKVGDIVKIMETRPLSATKRFRLLEVVEEAVII

SEQ ID NO: 10525 - protein, 122 aa, Enterococcus faecalis
MIQQESRLRVADNSGAREILTIKVLGGSGRKTANIGDVIVATVKQATPGGVVKKGEVVKAVIVRTKSGARRADGSYIKFDENAAVIIRDDKSPRGTRIFGPVARELRENNFMKIVSLAPEVL

SEQ ID NO: 10526 - protein, 103 aa, Enterococcus faecalis; identical to SEQ ID NO: 4936

SEQ ID NO: 10527 - protein, 179 aa, Enterococcus faecalis; identical to SEQ ID NO: 4937

SEQ ID NO: 10528 - protein, 132 aa, Enterococcus faecalis; identical to SEQ ID NO: 4939

SEQ ID NO: 10529 - protein, 178 aa, Enterococcus faecalis
MSRIGNKVVVLPAGVEIKQDGNNITVKGPKGELTREFSSDIKMNIEGNEVTFTRPNDSKEMKTIHGTTRANFNNMVVGVSEGFQKALELIGVGYRAQVQGNKLTLNVGYSHPVEMTAPEGVTFEVPANTQVIVKGINKEVVGELAANIRGVRPPEPYKGKGIRYVGEFVRRKEGKTGK

SEQ ID NO: 10530 - protein, 121 aa, Enterococcus faecalis
MKIVITKPDKNKTRQKRHRRVRNKISGTAECPRLNIFRSNKNIYAQVIDDVAGVTLASASALDKEISGGTKTETAAAVGKLVAERAAEKGIKKVVFDRGGYLYHGRVQALAEAARENGLEF

SEQ ID NO: 10531 - protein, 166 aa, Enterococcus faecalis; identical to SEQ ID NO: 4942

SEQ ID NO: 10532 - protein, 59 aa, Enterococcus faecalis
MAELKITLKRSVIGRPQNQRATVKALGLGKVNSTVTKPANEAIKGMVNTISHLVDVEEV

SEQ ID NO: 10533 - protein, 77 aa, Enterococcus faecalis
MEPAKRLEANVSGPIPLPPERSLYTVIRATHKSKDSRKQFEMRTHKRLIDIVNPTPKTVDALMKLALRSGVNIEIKL

SEQ ID NO: 10534 - protein, 146 aa, Enterococcus faecalis; identical to SEQ ID NO: 4891

SEQ ID NO: 10535 - protein, 397 aa, Enterococcus faecalis
MPGVNAKGLSDLSSLPFLNMLNMVSGSAMQNFSIFSMGVSPYITASIIIQLLQMDIVPRFVEWSKQGEVGRKKLNQATRYLTIVLGVAQSMGITAGFNSLSQTGIVNNPTLGTFVMIAVILTAGTMFVTWMGEQITEKGIGNGVSMIIFAGIISRLPGAVKEIYEDYFVNIESSRIWQSVIFIAILVIAILVIVTVVTFFQQAERKIPIQYTKRVSGAPTSSYLPLKVNAAGVIPVIFASSLIATPNAILQAFSSKFAGENWYDIMTKIFSYNTVPGAIIYTVLIVAFTFFYAFVQVNPEKLAENLQKQGSYIPSVRPGKGTEEYVSGVLMRLSVVGSIFLGLVALLPIIAQMVWNLPQSIGLGGTSLLIVIGVALETTKQLEGLMMKRQYVGFINK

SEQ ID NO: 10536 - protein, 231 aa, Enterococcus faecalis
MASFISRSLKLGGEYMNLILMGLPGAGKGTQAEKIIDTYGIPHISTGDMFRAAMKNETALGLEAKSYIDKGELVPDEVTNGIVKERLAEPDTDKGFLLDGFPRTLDQAKALDTMLKELNKKIDAVIDIHVEEDVLIERLAGRFICRTCGATYHKLFNPPKVEGTCDRCGGHEFYQREDDKPETVKNRLAVNIESSAPILAFYKEQGLMHTIDGNREIDTVFSDVKKIIDEN

SEQ ID NO: 10537 - protein, 84 aa, Enterococcus faecalis
MKTRNKYKEVLCVAKEDMIEVEGTVVETLPNAMFKVELENGHQVLATVSGKIRMHYIRILPGDKVTVELSPYDLTRGRITYRFK

SEQ ID NO: 10538 - protein, 38 aa, Enterococcus faecalis; identical to SEQ ID NO: 5000

SEQ ID NO: 10539 - protein, 121 aa, Enterococcus faecalis; identical to SEQ ID NO: 5001

SEQ ID NO: 10540 - protein, 129 aa, Enterococcus faecalis
MAAKKVSRKRRVKKNIESGVAHIHSTFNNTIVMITDTHGNALAWSSAGSLGFKGSKKSTPFAAQMAAEAATKVAMEHGLKTVDVTVKGPGSGREAAIRSLQATGLEVTAIRDVTPVPHNGCRPPKRRRV

SEQ ID NO: 10541 - protein, 312 aa, Enterococcus faecalis; identical to SEQ ID NO: 4904

SEQ ID NO: 10542 - protein, 127 aa, Enterococcus faecalis
MSYRKLGRTSSQRKAMLRDITTDLIINERIVTTEARAKEVRSTVEKMITLGKRGDLHARRQAATFVRNEVASVREEDESIVVESALQKLFNDLGPRFAERQGGYTRILKTEPRRGDAAPMVVIEFVK

SEQ ID NO: 10543 - protein, 77 aa, Enterococcus faecalis
MSHGSRYHRRPGSMGPVAPNRVFKNKRLAGRMGGDRVTIQNLEVVKVDVERNVILIKGNIPGAKKSLITIKSAVKAK

SEQ ID NO: 10544 - protein, 291 aa, Enterococcus faecalis
MLERINRLREYAMQPIIELNNIQFNYQPEDASPALKDVSFSIQQGEWVAIIGHNGSGKSTLAKTINGLLLPAAGTIKVGGKELNEANVWDIRRMVGMVFQNPDNQFVGSTVEDDVAFGLENQGIPRDEMVERVHDALERVRMLDFAKREPARLSGGQKQRVAIAGVVALRPDIIILDEATSMLDPEGRAEVIATIQKIKEESNLTVISITHDIDEAANANRILVMRQGQLTNEGTPEKIFSAGEALVEMGLDLPFPEKLKVALKERGVVVPTNYLTEEGMVDWLWTSVLNK

SEQ ID NO: 10545 - protein, 289 aa, Enterococcus faecalis
MDIRFKQVDFTYQPNTPFEQRALFDINLTIQDGSYTAIVGHTGSGKSTLLQHLNALVKPTKGQVTIGERVITPETDNKNLKPIRKKVGIVFQFPEAQLFEETVERDIAFGPKNFGVSDEEAKKLAKKMLDLVGLDEKYLQHSPFELSGGQMRRVAIAGVLAMEPEVLVLDEPTAGLDPKGRKEMMEMFSRLHKEHNMTIVLVTHLMDDVANYADHVIVLEKGQIVRAGAPQEVFQETQWLKEKQLGVPTAAEFAEKLVAKGFSFEQLPLTADQLADQLLKKMQEAGEAK

SEQ ID NO: 10546 - protein, 185 aa, Enterococcus faecalis
MALQTLFTQGGEVYFQWGIISITQFGVTNGLFIFCRFVLIIFMSTLLTLTTAPLELSDAIEYLLRPLRVVKFPVHEVSLMLSIALRFVPTLMDETEKIMNAQRARGVDFGEGNLLQKMKAIVPLLIPLFVSSFNRAEDLATAMEARGYQGGEGRTKYRILHWHLRDTIVMFGFVLLTIGLFVLRT

SEQ ID NO: 10547 - protein, 451 aa, Enterococcus faecalis
MQKKLVWRDYLYVGSMLFGLFFGAGNLIFPVHMGQEAGASVFLANLGFLATGIGLPFLGVIAMGVSKSSGVFDLASRINRRYALIFTLLLYLTIGPFFALPRLATTSFEIGLAPFVPKDLQWLVLAGFSTLFFLAVWLFSRKPSKILDYVGKFLNPLFLALLGILIVLAFVKPLGHVASAAVGENYISSPFFKGFTEGYNTLDALASLAFGIVVVSTLRNMGVEKPGDIAKGMIKSGAFSVVLMGIIYTLLAYMGTMSIGAFPISENGGIALAQIANYYLGLPGSILLAFIVVLACLKTGIGLSTAFSETFEEMFPKVSYQKFLAIVVILPAIFANVGLTNIIQFAVPVLMFLYPLAITLMLLVIISPIFKHRREVYQATTYITLIAAVLDALNSAPAFIKDTAFVTTLLEKAGQYLPLFTIGMGWVVPATVAFLISWVWVMISKKDPFFD

SEQ ID NO: 10548 - protein, 191 aa, Enterococcus faecalis
MFVTKMAVYCGASLGNEPIYQQAAVALAAWMKENHYDLVYGGGNVGLMGTVADTLLAEGGEVIGVMPTFLMEREIAHNGITKMHTVSDMHARKKKMIELADVYLALPGGPGTLEEISEVISWGRVGEHMNPCILYNVNGYYDLLAAFFDKMVETSFLTEADRAKIFISDSLEEIGAFIDSYEPPMIRQYKK

SEQ ID NO: 10549 - protein, 207 aa, Enterococcus faecalis; identical to SEQ ID NO: 4917

SEQ ID NO: 10550 - protein, 496 aa, Enterococcus faecalis
MSKKEINKVVASSYQLYINGEWTTGSGNKMIASYNPSNGEKLAEFVDATNADVDRAVEAAQEAFQTWKDVDVVTRSNLLLKIADLIEENQEHLAMVETLDNGKPLRETQSIDVPASADHFRYFASVIRGEEGSVKEFDKDTLSIVVKEPIGVVGQIIPWNFPLLMGAWKLAPALAAGNTVVIHPSSSTSLSLLELFKIFDQVLPKGVVNLITGRGSDSGNYMLAHPGFDKLAFTGSTEVGYTVAKAAADRLIPATLELGGKSANIIFEDANWERALEGVQLGILFNQGQVCCAGSRVFVQSGIYDQFVEALKEKFEQVNVGFPWEKDVEMGAQINEHQLEEILKYVEIGVKEGATLITGGQRLTENGLDKGAFLAPTLLANGTNTMCVAQEEIFGPVATVIKFETEEEVIRLANDSEYGLGGAVFSQDINVALRVARGVRTGRMWVNTYNQLPAGAPFGGYKKSGIGRETHKSMLDAYTQMKNIYIVTKEEADGLY

SEQ ID NO: 10551 - protein, 96 aa, Enterococcus faecalis
MELLDVIKRPVITEKSMLAMDEKKYTFEVDTRANKTLVKQAVESAFDVKVANVNILNVRPKFKRMGKYAGYTKKRRKAIVTLTEDSKEIQLFEAAE

SEQ ID NO: 10552 - protein, 1189 aa, Enterococcus faecalis
MENSRKEGPCLNIIERISQTEIAKSWRSQLMTTGTRQLITGLSGSAKTLLMAGALQKTHQKIVIAVPNLYYANQLVDDFLNILPSEQVHLFPVDEVLSAEMAFSSPEARADRVSALNFLMTANAGIVVVPVAGLRKYLPTKETWQNAQLHWEIGTEVEPEILAQRLVLMGYERQSMVGKPGEFSIRGSIVDVYPLNAEYPVRVELFDVEIDSIRYFEADTQRSLENLEEVTISPMTDLVFSKADMNHGMMRLQDALEKRLATAKDQTETDFLEEYFGQLLSSWEQGIPTENAHYYTDFLYQQKTTLLDYLPENSLLFVDDYSRMMETEREIAREEAEWQTLKIEEMRVFSEQTFGVDFHDQLRKTARNTTFFSLFQKGMGNLRFQEVHNFQYRSMQQFFGQMPLLKAEVDRWQKQNQTVVVFVPTKERIQKVEELFQDFDIPSVVSNWDQLLDWHVQIVQGALQTGFELPKNKLVAITEKEIFHTTTKKRARRQTISNAERLKSYSDLKTGDYVVHANHGIGKYIGMETLEVDGVHQDYMTILYQNDDKLFIPVTQLNLIQKFVASESKTPKINKLGGSEWTKTKRKVASKIEDIADDLILLYATRESEKGYAFPPDDAYQKEFEEAFPYSETDDQLRSAAEIKHDMEKSRPMDRLLVGDVGFGKTEVALRAAFKAVSNNKQVAFLVPTTILAQQHYETIQERFEGFPVEIGLLSRFRTKKQQNETIEKIKHGQVDIVIGTHRLLSQDINFSDLGLLIIDEEQRFGVKHKERLKQLRSQVDVLTLTATPIPRTLHMSMLGVRDLSVIETPPENRYPIQTYVMENNPGAIREAIEREMARDGQVFYLYNRVDTIERKVEELQALVPDARIAYAHGQMTEVQLENTLFDFIEGQYDILVTTTIIETGVDIPNANTLFVENADYMGLSTLYQLRGRVGRSNRVAYAYFMYEQQKILNEVSEKRLEAIKDFTELGSGFKIAMRDLSIRGAGNLLGAQQHGFIDSVGFDMYSQMLSEAVARKQGKNIQDQKTSVEIDLGIDAYIPGTYITDERQKIEIYKRIRQLENMDMYEELEADLLDRFGEYPDEVAHLLTTGRIKMDGDRALLESIRKRDQKVKFVLSKIGTKTYSVEQLFEALSATSLKADLAVEKEQMTISLKLPKDCKEAVWIQEIAAFTTALRQEKYKHSQETDSL

SEQ ID NO: 10553 - protein, 110 aa, Enterococcus faecalis
  VARIANT (1)...(110): Xaa = Any Amino Acid
MVKFTVWRKNFTDETKXIQEVNVMRLDKFLKVSRIIKRRTVAKEVADKGRIQINGVLAKSSSTVKIGDLVKIQFGNRILEVEVLQLNDSTKKEDATKMYEIKSETRVSEE

SEQ ID NO: 10554 - protein, 726 aa, Enterococcus faecalis
MMSIRRTGMNKKNNGMKNGLYYVLVVLAMVMVVYFIFGNNNQQSPDIDYSTFQQQLEDGKVKDMTIQPTNGVYRIEGQYKEKQEVKDTGGLSLWGSTQASSKGFTTTVLPSDTTLAGIQDAAQNNKVKLVVKEQSTSGAWLSLLFSFLPLVIIFFFFYMMMSQQGGGGGGGGRVMNFGKSKAKEADKKANRVRFSDVAGAEEEKQELVEVVEFLKDPRRFAELGARIPAGVLLEGPPGTGKTLLAKAVAGEAGVPFYSISGSDFVEMFVGVGASRVRDLFETAKKNAPAIIFIDEIDAVGRQRGAGMGGGHDEREQTLNQLLVEMDGFDGNEGVIVIAATNRSDVLDPALLRPGRFDRQILVGRPDVKGREAILRVHAKNKPLADDVDLKVVAQQTPGFAGADLENVLNEAALVAARRNKKKIDASDVDEAEDRVIAGPAKKDRVINKKEREMVAYHEAGHTIVGLVLSRARVVHKVTIIPRGRAGGYMIALPKEDQFLMTKEDMFEQIVGLLGGRTAEEIIFGVQSTGASNDFEQATGIARSMVTEYGMSDKLGPVQYEGNHQVFVGRDYGQTKAYSEQVAFEIDQEVRRILMDAHTKAHEIIEAHREQHKLIAEKLLEYETLDAKAIKSLFETGKMPEGADSDYPSEKEAQTFEEAKRALEEKEAQKQVEEKQDFEEAKKELHDEAEEVKVESEQTEKEVQSEEKKDSDSNSEYDRNNYEDRYK

SEQ ID NO: 10555 - protein, 276 aa, Enterococcus faecalis
MAIKKYKPTTNGRRNMTSSDFAEITTSTPEKSLLQPLKNNAGRNNNGRITVRHQGGGHKRQYRVIDFKRNKDNVAAVVKTIEYDPNRSANIALVHYEDGVKAYILAPKGLEVGMRLVSGPEADIKVGNALPLENIPVGTVIHNIEMKPGKGGQLIRSAGTSAQVLGKEGKYVLIRLNSGEVRMILATCRATIGSVGNEQHELINIGKAGRSRWMRKRPTVRGSVMNPNDHPHGGGEGKTPIGRKAPVSPWGQPAIGYKTRNKKAKSDKLIVRRRTK

SEQ ID NO: 10556 - protein, 498 aa, Enterococcus faecalis
MAEEQQAHLEDLNDQMLVRREKMEALREEGIDPFGKRFDRTHNSAELHEQYDNHTKEELSEMNTEVSVAGRMMTKRGKGKAGFAHLQDREGQIQIYVRKDQVGDEAYELFKHADLGDFFGVTGQIMKTNTGEVTVKAQTITLLTKALRPLPDKYHGLTNVEQRYRQRYLDLISNKESFDRFMKRSQIISEIRRYLDGNGYVEVETLVLHNEAGGAAARPFITHHNALDMDLYLRIALELHLKRLIVGGMEKVYEIGRVFRNEGIDTTHNPEFTMLEAYTAYTDYQDVMDLTEGIIRNAAEKVLGTTDITYDGQAVDLGSPFKRLHMVDAVKEQTGVDFWQEMTIEEACALAKEHNVEITDAMTVGHIINEFFETFVEDTLQQPTFIYGHPVAVSPLAKKNPEDGRFTDRFELFIIGKEFANAFTELNDPIDQRERFEEQEKEREQGNDEAHGVDEDFIEALEYGLPPTGGLGIGIDRLVMLLTDAQSIRDVLLFPTMR

SEQ ID NO: 10557 - protein, 92 aa, Enterococcus faecalis; identical to SEQ ID NO: 4920

SEQ ID NO: 10558 - protein, 117 aa, Enterococcus faecalis
MQMSEQITSAKATAKTVRTSPRKARLVIDLIRGKSVADAISILKFTPNKSAGIIEKVLMSAVANAENNFDLDVESLVVSEAFVNEGPTMKRFRPRAKGSASPINKRTSHITVVVTEK

SEQ ID NO: 10559 - protein, 218 aa, Enterococcus faecalis
MGQKVHPIGMRVGIIRDWDAKWYAEKEYAEFLHEDLRIRKFIATKLADAAVSTIEIERAANRVNISIHTAKPGMVIGKGGSEVENLRKELNKLTGKRVHINIVEIKKPDLDAKLVGEGIARQLENRVAFRRAQKQAIQRAMRAGAKGIKTQVSGRLNGADIARSEGYSEGTVPLHTLRADIDYAWEEADTTYGKLGVKVWIYRGEILPTKKNTEKGGK

SEQ ID NO: 10560 - protein, 144 aa, Enterococcus faecalis
MLVPKRVKHRREFRGKMRGEAKGGKEVAFGEWGLQATESHWITNRQIEAARIAMTRYMKRGGKVWIKIFPHKSYTSKAIGVRMGKGKGAPEGWVSPVKRGKIMFEIAGVPEEVAREALRLASHKLPVKTKIVKREEMGGESNEG

SEQ ID NO: 10561 - protein, 157 aa, Enterococcus faecalis
MGIVTLSDRCFQGLAVDQSGPLIREQLPVLYQVTKQTILPDEENQLVELLQEWSKTCDLILTTGGTGLSERDRTPEATLRVAERVVPGISEGLRQLSLEKTPFAMLSRGVSVQRGRTLIVNLPGSPKSVTEHLHFLLPVLPHALDLITNKKIIHDEE

SEQ ID NO: 10562 - protein, 788 aa, Enterococcus faecalis
MNQRILSTLGFDKVKQQLLQFIVTAQGTNEVSELLPIADENKIQAWLNETQDGLKVQRLRGGIPIPKLENIQPHMKRIEIGADLNGVELAQVGRVLSTTSELTRFFDELSENEVDFERLYMWREQLEVLPELNRQLKQAIDDDGYVTDEASPALKAIRQNIRRSEQTIREELDSIIRGKNARYLSDALVTMRNERYVIPVKQEYKNIFGGVVHDQSASGQTLFIEPKQILEMNNRLRQQQIAERNEITRILAELSAELVPYRREITHNAYVIGKLDFINAKARLGKELKAVVPEISQANHVVFKQARHPLLDPEKAVANDIVIGEEYQAIVITGPNTGGKTITLKTLGLLQLMGQAGLPIPVEEESKMGIFTEVFADIGDEQSIEQSLSTFSSHMTNIVSVLKKVDHQSLVLFDELGAGTDPQEGAALAIAILDSLGAKGAYVMATTHYPELKVYGYNRAGTINASMEFDVDTLSPTYRLLIGVPGRSNAFEISKRLGLDNSIIEAAKQIMDGESQDLNEMIEDLENRRKMAETEYLEARHYVDESAALHKELKEAYQVFFEEREKELQKARKEANKIIAEAEENAETIISDIRKMQLESGQQGGVKEHQLIDAKTQLSQLHHEETKLAKNKVLKKAKEQKKLKAGDEVIVNTYGQRGTLLKDNGKGQWQVQLGILKMNVSEEDMTPVAPQKEAKPRVTTVRSAESSHVGTQLDLRGKRYEEALAEVDQYIDAAILAGYPQVTIVHGKGTGALRTGITEFLKNHRSVKSYEFAPQNQGGNGATVVKFQ

SEQ ID NO: 10563 - protein, 299 aa, Enterococcus faecalis
MLEVKELVKTFGDFKAVDHVSFTIPDGKILGLIGQNGAGKTTTFRLILNFLTQDSGSVLWNGQPLNEKEYNIIGYLPEERGLYPKITIEDQLIYFASLRGKTKKEIEPKIDFWMEKFQVKGKKTDKVKSLSKGNQQKVQLIATLIHEPKLIILDEPFSGLDPVNAELLKDGIIELKNQGSCVIFSSHNMDNVEKICDHLVMLKNGRMVLDGQVHEIRQQFGRTKLFLESPLSVEEVAATAGVKEAHLRQDGVLEATLENAEVGKVLFDKATANGYIPMFNQQPPTLEEIFKMKVGGQDE

SEQ ID NO: 10564 - protein, 439 aa, Enterococcus faecalis
MVHYLLNWRRTMKKFDVIIVGAGTSGMMATIAAAEAGAQVLLIEKNRRVGKKLLMTGGGRCNVTNNRPAEEIISFIPGNGKFLYSAFSQFDNYDIMNFFESNGIHLKEEDHGRMFPVTDKSKSIVDALFNRINELGVTVFTKTQVTKLLRKDDQIIGVETELEKIYAPCVVLTTGGRTYPSTGATGDGYKLAKKMGHTISPLYPTESPIISEEPFILDKTLQGLSLQDVNLTVLNQKGKPLVNHQMDMLFTHFGISGPAALRCSSFINQELTRNGNQPVTVALDVFPTKSFEEVLKNVDYMIEEQPNKVAKNAFHSLIPERLLTFYLEKLAIEEVPAKQLTEKQRLSFVELLKDFQFTVTKTLPLEKSFVTGGGISLKEVTPKTMESKLVNGLFFAGELLDINGYTGGYNVTAAFVTGHVAGSHAAEIAEYTYLPIEEV

SEQ ID NO: 10565 - protein, 449 aa, Enterococcus faecalis
MSHIQLDYSKLAPFVADHELEYMQTQVTAVDKALREGTGAGNDFTGWIDLPENYDKEEFARIKKAAAKIQSDSEVLVVIGIGGSYLGARAAIEFLTHSFNNLLSKEERKAPQIFFAGNSISSTYLADLINVIGDRDFSVNVISKSGTTTEPAIAFRVFKELLINKYGKEEANKRIYATTDRAKGAVKVEADAEGWETFVIPDDVGGRFTVLTPVGLLPIAVSGADIDRLMEGANDARKEYGATSDLKENQAYQYAALRNILYRKGKTTEMLINYEPGMHYFSEWWKQLYGESEGKDGKGIFPAAADFSTDLHSMGQYVQEGMRNLFETVVKIENPRHSISIPEQNEDLDGLGYLQGKEIDFVNTKAFEGTLLAHTDGGVPNMIVKVPTMDAYSLGYVMYFFEIAVGISGYLNGVNPFDQPGVEAYKRNMFALLGKPGFEELAKDLNARL

SEQ ID NO: 10566 - protein, 432 aa, Enterococcus faecalis
MLKRNQPMLLERMGKMQSATDVAEYCKYDGFDGLKRAISLSDEEILNELDVAHLRGRGGAAYPLGKKWRHLYHAKGTTKYIVCNADEGEPGTFKDKVLLSEDPLSVIEGMIIAGYLFSAKAGYIYMRGEYRRIQKTFQEALDNARQAGFLGENILGIEGFNYDITIISGAGAYICGENSALLNSIEGKTGQPRVKPPHLADVGLYLQPTLVNNVESFASVPIILREGGQAFLEMGTADGGGTKLICLSGHIKNRGLYEVNLGTPLEEIIYGEQYGGGSATGRALKFIHFGGQSGPIGAVATLRDCLYSYEDLWAHDLSVGSGAIVVMDDSVNVVDYLVHVAAFFAHESCGKCTPCRLGTTRILELLSKFNRNEATASDLPRLEKMLTHVTRLSACGLGQSVANPMKSALALFPEEFETTAETEIYATSKGGW

SEQ ID NO: 10567 - protein, 906 aa, Enterococcus faecalis
MKTKLHTQTVTLSIDNQEVTVPKGTTILEAAKGLGVEIPTLCHLKELAPDGSCRMCVVEVEGGRRGGLTTACTAHCQEDMVVATHSEKVADSRRFILDLLLSNHKLECFSCGKNGDCQLQQYALDYGIDATSFTEGKRMPCHQEDTSNPFFSYDPEKCIMCRRCARVCQLRQGRDVLSIANRGFETKMMPSYGQAFDQSICESCGNCVSSCPTGALTAKDMKEYRKWETQKIPTTCPHCGTGCQMNLLVKNNRLVGVEPLDGPANKNLLCVKGKFASYKFVGSGDRLTEPLIKRNGIFEPASWEEALTLVSSKFNEIKAENGPDALAGFSCSRATNEDNYVFQKMVRAAFGTNNVDNCARVCHSASVHGLAQTLGSGAMTNPIADITEDVDMILLVGSNPEEAHPVIGAQIRQAIQRGTQVVVVDPRKINLVKDSALHLQVQAGTNVAFANGMMHVILKEGLADRHFIEERTEGFSDLEKMVADYTPEKVAEICHIHPEDLIQAARMYAKAEKAPIIYCLGVTEHSTGTEGVMSMSNLAMLVGKVGKPGCGVNPLRGQNNVQGACDMGCMPYDFPGYQKVNNPEVIDKFEKAWHVPLNRNTGLTSTKVLPAATAGNVKGLYIFGEDPIVTDPDTGHVRQALESLDFLVVQELFMTETAAYADVVLPGISYAEKDGTFTNTERRVQRVRKAVEPRGQAREDYEIFCEVMTRMGYPCAYESAKEIMKEISAVTPSFGGINYERLEKESLQWPCRSLTDPGTPIMHVGSFARGKGLFKAIPYKQAQELPDEEYPYLMSTGRMLYHYNTRAMTGRTEGINQIANHSYIEINAVDAQALGIQEGDKVEVHSRRGKIETYAAVGNRVFPQEVFMTFHFPDGNVNEITNAVFDDIATIPEYKVCAVAIKPVNK

SEQ ID NO: 10568 - protein, 400 aa, Enterococcus faecalis
MIELEEAREKMTQHMKSQCETEEVALLDSLGRISGETIFAETAIPHFPRAGMDGYAVRAVETRGATAESPSCLKVVGSLVAGDSMFYCNQTNNCAIKITTGAFIPTDFDAVVPQEWTDFGQDHVKIFRSVTAGQNYAEIGEDIAFQQKILAKHQQINSRMIGLLAMQGIDKVVVLKRMKVGILATGSELVSLEEPLSIGKIYNSNLYMLAAFVKASGNEVIHLDHCSDDPEELAKRLIEISPKLDVLITCGGVSVGEKDNLPLAIKRIGGTELFHFVNMKPGTPVMGSQFQETLILSVSGNPFAAMVNLHLFYWTLLATFFNCVELNLKERTVILAHELTPSRLRRFYRAKEIDGTVNLVTKSHLSSNLSNTLETNCLLEQPAGVLLKKGALVKVYYWQT

SEQ ID NO: 10569 - protein, 426 aa, Enterococcus faecalis
MLIYLTKKDCELFDMDQFSILTEQEFTTFAMTHPAGNFLETPEMKHLLERRGWHCEYVGVKREGQLIAACILSKKKVKIGYAFDIDGGILMDYTDKKCVEAFFTGLKKYVKKNDGLYLTFTPNKQICLRDFNGGEVEKVNQETFDYFTSIGFEHQGFDVHNFDGAPRWLFVKDMAGLTEEDLWKSYGKDAKYDIKKTWEYGVTTRELRYEELPLFKKLTEETSARRNFEDKDLAYYQAVYEEFGERAKFMVAELNFATYLENLHEKLRKLQETLNEVNEALIANPKSRKKNNQKREFEDEVRTVRKRIDEAKEMKTSDEPEILAGALFIVHPQEVVYLFSGTYEKYKQYYAPYLIQHKMLTYTVENNIPKYNFYGVDGVFDGSDGVLKFKQSFGGHVEELMGNFQWKAKPMKYALYHALKTIKEKV

SEQ ID NO: 10570 - protein, 226 aa, Enterococcus faecalis
MYQLFEKYFPNVVQLKQEFLQSTWETLYMVFWTALIAGVLGVLLGVVLVSTGPSGVLKNPPLYSVLEKIINVCRSIPFIIMLALIQPLTRILAGTTIGTTAALVPLVIGVIPFFARQIENALLEVDPGVIEAAEAMGTSPLGIIFRVYLIEGLPSIIRVSAVTIINLIGLTAMAGAIGAGGLGNLAITRGYNRFQTDVTFMATLIILIMVFISQAISNQLIKKTSH

SEQ ID NO: 10571 - protein, 374 aa, Enterococcus faecalis
MADNSKRRVVVGMSGGVDSSVTALLLKEQGYDVIGIFMKNWDDTDENGVCTATEDYKDVAKVADQIGIPYYSVNFEKEYWDRVFEYFLAEYRLGRTPNPDVMCNKEIKFKAFLDYAMQLGADYVATGHYAQVETDENGVVHMLRGIDNNKDQTYFLSQLSQAQLAKTMFPLGGMEKSEVRAIAERAGLATAKKKDSTGVCFIGEKNFKEFLSNYLPAKKGNMVTEDGEIKGQHDGLMYYTIGQRQGLGIGGGGKTQEPWFVIGKDLTTNTLYVGQGFHHEKLYATHLEASEVHFTVDTPMPKEFDCTAKFRYRQADIPVHVSLSEDGTKATVTFKEPARAVTPGQAVVFYDGMECLGGGLIDRAYQDEKELQYV

SEQ ID NO: 10572 - protein, 766 aa, Enterococcus faecalis
MRLLLKIKLSLPQYPIILAKQNSANGKLFETHEFKEKPQGIFFKLFFYSRNLEKIELIFGIIRKDSTQKGAKLVVAKQLIIAEKPSVAKDLSRVLGANQKNKNYYEGPNVIVTWALGHLLGLKMPEDLNKEWQTWQMETLPMIPKNLGIKPLPKTGHQLKAIKQLANRKDVSEAVIATDAGREGELVARWILEYVRFNKPVKRLWISSQTDKAIKDGFKKIRPAKDYDNLYYSALARAKADWLVGLNVTRALTVKYQDNLSAGRVQTPTLAMVRQQEKTIEQFKPQTYFTISLTVESEKAKMTQKNPYALKERQEAEQLVKELSKQKGLVTDIQEKVKTENAPLPYDLTEIQREANQRFQFSAKKTLSLVQSLYETHKIVSYPRTDSKYLTTDTKGTMKERLQAIADFSPEVKGYLKNGAVVKQQKVFQNAKVTDHHGLIPTEQRPRYEKLSNDEQKIYQMIVQRFLGLFAEPNQTKQTKVTVAFGKETFVFHQNKVVVAGWKTTAEQPLSTVQWQKGMTVAPNFTINKELTSPPKPLTEGTLLGKMEKHSLGTPATRAEIIEKLIKSELMERTNSGLSVSAKGKQLLDLVNPSLVTPELTAKWEKSLEAIASGQQKSQLFLKDIEEDTKKLVREIKQSEKKYQDFSITQKKCPDCGSNLREKNTKDGKIYVCTNQECSYRRRKDPKVSNHRCPQCHKKMVIIEGKNGRSFKCKFCSITEKIPDKKERKQKMTKHEERRLMKKYSQPDEPEESALAQALKAAMNQE

SEQ ID NO: 10573 - protein, 326 aa, Enterococcus faecalis
MNTFWKSFPDVERSLTETCELIEQTLHTRNEDIEEALVTLARSGGKLLRPAFFFLFAQLGDEEKQEKQQLLKIAASLEILHMATLIHDDIIDDSPLRRGAVTIQSQYGKDVAVYTGDLLFTEFFTLIADAMNGSEFMKINAQGMKRLLLGELDQMSHRFDRRMSIPAYLRSVNGKTAELFSLSCLEGAYFGHSSKEVQRLAKRIGRHIGIAFQVYDDILDYTADTETLKKPALEDLSQGVYTLPLLFAYQAAPDVFSPYLDKGRAITLEEAAEVAALVNDYHGVTEAQAFAKKVTNKAITDIQQLPDGTAKETLLSLTELLLHRSF

SEQ ID NO: 10574 - protein, 403 aa, Enterococcus faecalis
MNKKHVVILGAGYAGLKTLRELQKGAKDVEITLVDRNNYHYEATDLHEVAAGTQPAEKITYNIMDVVDEKMTTFIQGTVKTIDAATQTVALEDGQTINYDYLVVSLGFESESFGIPGVQEHALQMVDVKTALNVYEHIQEQMRQYKATQNEEFLKIVVCGAGFTGIELLGSLVENKPKFAEIAGVSADQIQIYCVEAVTRLLPMFNEKLANYGVQLLKDSAIHLLLGKPIKEIKPGTVVYQDNEAGDLAELSAKTIIWTTGVSGSHVVGDSGFEARRGRVMVQPDLTDANHSNVYIIGDCSAVMDTETNRPYPTTAQIALKMGAHAAKNIQAQLKGEATKPFSFKSQGSVCSVGNTRALGIVGKTDIKGYPASFMKKIIMNKALFETGGTKEMMAKGRFDLYH

SEQ ID NO: 10575 - protein, 769 aa, Enterococcus faecalis
MAQKRSTNKKKSTTKKKTKKQQQQQERLNYMFLGLIFILFGVFGLFRLGFLGTLLANCLRLVVGNTFPFAAILLILYGLLVMIYGKDFPLKRGRPIFGAVLIYISVLLFFHAFMFRNVSGSQPDILGNTWEFLQSDLKANQVTQNVGGGMIGALLYQGTYFLVAQFGSYLIATLLLLAGIFLMSMWDFQQIVDHFQSIQDRLSHVSAKSQARQEEKEAKRAAKKEAKAAERQAKIEAAAQQKLQERERMEQAAADRLTKTPVETHQPMVEEPAAPTPVQIDSFQQQNQAMPVPPIAATKPQREQEEEAADEAGVLEFEISEEAEDRDYQLPPTDLLDTIQATDQSGEYEKIEKNIGVLEQTFKSFGVDAKVVKASLGPSVTKFEVQPAVGVKVSKIVNLTDDIALALAAKDVRMEAPIPGKSLIGIEVPNSAISTVSFRDIVEAQPSHPDKLLEVPLGRDISGMVQTADLSKMPHLLIAGSTGSGKSVAINGIITGILMQAKPHEVKLMMIDPKMVELNVYNGIPHLLTPVVTNPRKAAQALQKVVQEMEFRYEKFAATGVRNITGYNQLIQQKNAEDGENRPILPFIVVIVDELADLMMVASNEVEDAIIRLAQMARAAGIHMILATQRPSVDVITGIIKANVPSRMAFAVSSGTDSRTIIDTNGAEKLLGRGDMLFLPMGENKPIRIQGAFISDQEVERVVAFVTDQQEAEYQESMMPTDEPTTSGGGELLKMSCLKKRKTWWLKCKQLVFHCYKDVLELAIIVRLA

SEQ ID NO: 10576 - protein, 63 aa, Enterococcus faecalis
MVEMQTASISLLQRRFRIGYNRAARLVDELEAHGVIGPSEGSKPRKVFLQAESEEAAPETPEQ

SEQ ID NO: 10577 - protein, 257 aa, Enterococcus faecalis
MRRIGVENMLEVQNLKKVYGNEIKYEALKGINLTVQDGEFIGIMGPSGSGKSTLLNLLATIDSPTDGEILLNGKNPNNLNQEQIAKFRRTELGFVFQSFNLMPTLTVEENIILPLTLDGEKVSVMKRQLAELSERLGINHLLKKRIAEISGGQAQRVAVARAMIHHPQLLLADEPTGNLDTKSSKDVMGLLQQLNEEEAATILMVTHDPLAASYCKRIVFIKDGELIDEIIQNGNQKEFYDIIMVKLAEIEGVDNEF

SEQ ID NO: 10578 - protein, 323 aa, Enterococcus faecalis
MEQAIQLLQQSLDTSFLDAYIENGENILDDFQVRVLDGVPNPETVKQLETLYHTIKKIDLAPEDVRRLSQLLLLKGTRKEQLQANHQLTPDGIGFLFVYLVEQLTNKSEPLKILDPASGMGNLLLTVLLNLETAGYKVSGYGVDIDETLLAVSSVNNAWSQANIQLFHQDGLQDLLLDPVDLALSDLPIGYYPNDERAKGFAAAAEEGHSYAHHLLMEQAMKYVKPAGFGLFLIPTNILETEQSEFFKNWLTKNVYLQGMIQLPDELFKSEQSRKSILLVQNKGADAEQVKEVLLAKLASLKDINKVTEFFKQFEAWKASNLK

SEQ ID NO: 10579 - protein, 602 aa, Enterococcus faecalis; identical to SEQ ID NO: 4900

SEQ ID NO: 10580 - protein, 586 aa, Enterococcus faecalis
MAYQALYRVWRSQRFDDVVGQKAITQTLKNAIVQKKTSHAYLFTGPRGTGKTSAAKIFAKAINCKHSQDGEPCNVCETCVAITEGRLNDVIEIDAASNNGVEEIRDIRDKAKYAPTQAEYKVYIIDEVHMLSTGAFNALLKTLEEPPQNVIFILATTEPHKIPLTIISRTQRFDFKRISTQDIVDHMAHIMQEMALDYEEQALYVIGRAAEGGMRDALSILDQTISFSDEKVTLEDAMQVTGSLTYEMMDHYIQCCVAGDVERALEGLESILGEGKEARRFLEDLLLYCRDLLMYQQAPKLLAEKAGTLTEAFKELATQTPAEKIYQLIQILSDTQNEIRFTNNANIYLEVATVKLAKTVQPNKHNTPETANQDGSAEGNPELADLQNQIGQLKKELAELKKHGVAAKEADAPRQQARPQAPKSSFRVPTERVYQVLNEATRTHLMNVKNVWEDLLQTLSVTQRAMLKASEPVAASPKGIVVAFDYEIVCARATDDEEMQLAFNNNLSRLMDYTPEMVCITRESWPKLRQSFINQNQGSLNHSEPENEMARLADEPPVTNEHSQENPVVDEAIAMFGEELVEVLDD

SEQ ID NO: 10581 - protein, 104 aa, Enterococcus faecalis
MMRGMGNMQGMMKQVQKMQKEMAKAQEALNEKEFIGEATNQLVTATFTGDRTMKDLTIKEDVVDPEDVDMLQDLVIMAVNDALVKIEKETEATLGKYTKGMPGF

SEQ ID NO: 10582 - protein, 242 aa, Enterococcus faecalis
MANALLYIDAKPIMADDPREFPQLFQQTSALVLNLGHLSQEREQSLLAASDYARQVTKPTVVDLVGYGASDIRNEVGEKLVHNQPTVVKGNLSEMRTFCQLVSHGRGVDGSPLDQSEEAIEELIQALRQQTQKFPQTVFLATGIQDVLVSQEQVIVLQNGVPELDCFTGTGDLVGALVAALLGEGNAPMTAAVAAVSYFNLCGEKAKTKSQGLADFRQNTLNQLSLLMKEKDWFEAVKGRVL

SEQ ID NO: 10583 - protein, 211 aa, Enterococcus faecalis
MREQLKVYLVTGRYDFSDTEFLKRIETACRSGVTLVQLREKEVSTRRFYELAVKVKAVTDAYQIPLIINDRVDICLAVDAAGVHIGDDELPVALVRKLVGSTKIVGVSAKTVARGVEAENEGADYLGVGAIFPTTTKDSPLTSLQTLSEIAAAVTIPVVAIGGIKEENIEQLMGTGVAGVSLVSEIMLAEQITEKVQGLMRVTERMLEVRK

SEQ ID NO: 10584 - protein, 314 aa, Enterococcus faecalis
MLGIMLLFISGNLIAAFAPTFIILLVGRILSALAHGIFMSVSTVIAADVVPPSRRASAIAIMFTGLTVATVTGVPLGTFIGQQTAWHMSFLFIASIGLVGLIASYFLVPKNLPIPGKVDLKGITRIFTNKPLVFSFLITAFGYGGTFAAYTYLSPLLENLGFSDNAVVIILVVYGVMVAIGNTVGGHWANKKPLDSLVKMFSLLILSLVFLFITVLMDNSLLGLLASLMLGLFAFMNVPGLQLYVVELAEKYVPEDITLASAFNIAAFNIGITVGSMTGGMVTDHLSVTYTPIFGGFIVLIAVLFVLYIRKQEA

SEQ ID NO: 10585 - protein, 220 aa, Enterococcus faecalis
MTFTEQAKEQAQASWQGSFQHPFITELHEGTLSPTIFRYYLIQDHYYLKHFSQLYRLIAAQTQQPRLKKLLLTNAESLALGELAIRETFFEELAITEEEVAATPIAPTAYHYVSHMYRQLIEGTPKTAAASMLPCSWLYQEIGAQLVKQHSPEPLYQRWIETYAGEEAYQHVQEERQLLDQLYEESSPQEQAAMITAFVISSEMEYAFWEMAYTHETWIG

SEQ ID NO: 10586 - protein, 212 aa, Enterococcus faecalis
MQGIFITFEGPDGAGKTSVLKEVSERLAKESKRKIVTTREPGGIPIAEKIRTVILDPRNDRMDERTEALLYAAARRQHLVEKILPALEAGHLVLCDRFVDSSLAYQGAGRRIGIAPIASINAFATEGVSPDFTIYLDVDSDTGLRRIQENRTQQIDRLDSEGLEFHQRVRHEYLKLAEENPQRIKKIDARMSLELVVEATYQAIIERYPENF

SEQ ID NO: 10587 - protein, 316 aa, Enterococcus faecalis
MNEAQQLQQMQPLLYKQLQKSFEHGRLAHAYLFEGDTGTGKQEFGLWMAKHVFCTNLVNQQPCNECHNCVRINENEHPDVLRIAPDGQTIKVNQIRELKAEFSKSGVETAKKVFLIQEADKMSTGAANSLLKFLEEPEGQILAILETTSLSRILPTIQSRCQTLHFQPLVKKTLIDRLIKQGIGEKTATLLAELTNSFEKAVEISQDEWFNEAKEIILQWFNYLKSNDLQAFIYVQKKMVKVFKEKEQQALSFDLLMVYYRQLLEESVATQQAKKVTEEQAERLALILKARQKWTANVSWQNVCEQLVIQMIHPKS

SEQ ID NO: 10588 - protein, 290 aa, Enterococcus faecalis
MQKQKSFDKQTTKGKLYLVPTPIGNLEDMSIRCLNILKEATVIASEDTRNTQKLLNHFEITTPQISLHEHNYKERIPQLITRLLSGETIAQVSDAGMPSISDPGHELVTACLEEELAVIALPGPTAGMTALIASGLLPQPFTFYGFLPRKKKEQKDVLSALKEERPTQIFYESPYRIAKTVATFAEVYGQERPAVICRELTKLHEEYLRGTLGELTEYLAENTLKGECCLLVSGFTGEKETIAAMPAISLKEHVQVLMEEEGRSSKEAIKEVAKLRNVKKQEVYKEYHSI

SEQ ID NO: 10589 - protein, 506 aa, Enterococcus faecalis
MEKVINMIQTIDEWARKEPQRPVYLTEEKVSTYGELKEKSDNLAAYLAELKTDKSAIVVYGELDFEMIVSFLGASKAGFSYIPIDAHTPKERIELILNVAKPTAVIAVHEWPELATEVPVITAEELTEMMIHAPRHAPALIPVTGASNYYIIFTSGTTGVPKGVQISHDNLVSFTNWLLQDFGLEEGARFLAQAPYSFDLSVMSIYPALALGGSLTPLPNEIINDFKQLFTRLPQLTIDVWVSTPSFIELCLMEPSFDGEHLPALRTFLFCGEELPKPTAEKLAARFPTAHIYNTYGPTEATVAISAIEITQEVLKSVQRLPIGYVKEDTQIYIMEGMSKLPAGEIGEIVIAGPSVSKGYLNNPAKTAEAFFQLDGVPAYRTGDAGKLVDNLLQYEGRLDFQIKLHGYRIELEEVDHHLTNVSYVKQAVVVPKYQGNKVQQLIAYVVPQAHEFSSDFQLTKAIKQELATLTMDYMIPQKFVYVEQLPLTSNGKIDRKGLMNEVNAT

SEQ ID NO: 10590 - protein, 360 aa, Enterococcus faecalis
MDAKEEKMLIDLTSAKGIAGNEDEVRSLFKKYAAPYADKFLYDGLGSIIAKNVGDKEGPKVYISGHMDEVGFMVTQITEKGFLKFQTVGGWWGQVMLAQQVQIKTTTGKVYHGVIGSKPPHVLTVEVRNKPYEIADMFIDIGASSDQQVAEWGIHPGDMVTPYIDYRRMNDTKFLLAKAWDNRIGTAVSLKVLENLATEGHPNILFAGSDVQEEVGLRGAQTSTHLVNPDIAFALDTGTAGDTPGMTPKEADSVLGEGPQILIYDASMIPHKKLRDFVIQVAEENNIPFQYTVITGGGTDAGRMHLTRNGIPSLAITVPVRYLHSHTSVIHEDDYFNTVKLVTEVVKRLDKETVAKLTSY

SEQ ID NO: 10591 - protein, 187 aa, Enterococcus faecalis
MNLINQKLFDFECDAYHDGEFTRVSTEDILGKWSIFFFYPADFSFVCPTELGDMQEHYAHLQELNCEVYSVSEDSHYVHKAWADATETIGKIKYPMLADPNGQLARFFGVLDEASGMAYRASFIVSPEGEIKSYEINDMGIGRNAEELVRKLEASQFVAEHGDKVCPANWQPGEETIAPSLDLVGKI

SEQ ID NO: 10592 - protein, 417 aa, Enterococcus faecalis
MENSKKNQAVQVSNSYWIKVVAIFFVGWILMYATRTIFNPVMGVIGEQFGLSNTQLGLANSIFFLTYAVAQIPFGMIGDKIGRKLVIAVGFIVLAISTYFSGLATTFVMFLVIRAIAGIGQGAYYGPQYALSTEAIPASKRTIGNAIINSGMAFGTSGGYLLSSKLVLENGEHWSKPFFIMAIPTFIVGILFYTILKEKVIRPGEEAARAAAEEGPQEKISLKEIFSNRNLLAAFILCFTSIYANFVIITWLPQFLIAERGFTGASVGFISSLVPWASIPGALIFARLNDKTGATKKLVFTLVPLAILSVFAIAFVTNRTLLISVLILYGLTGKLALDPIMVTFVTKHAPKAALGTTLSAYNFIGMSGSILAPYVTGYLADTAGSMQVGFYLSCVLLVIGLLAFAFLAKDESKPKLG

SEQ ID NO: 10593 - protein, 764 aa, Enterococcus faecalis; identical to SEQ ID NO: 4949

SEQ ID NO: 10594 - protein, 145 aa, Enterococcus faecalis
MENLTNISIELNQQFNTKEEAIRFCGEKLVEAGCVEPAYIEAMIERDQLLSVYMGNFIAIPHGTEEAKKLVKKSGICVVQVPEGVNFGTEEDEKIATVLFGIAGVGEEHLQLVQQIALYCSDMDNVVQLADALSKEEITENLAIA

SEQ ID NO: 10595 - protein, 384 aa, Enterococcus faecalis
MNAVHFGAGNIGRGFIGEILAKNGFHITFVDVNETIIQALKERKSYTIELADASHQQINVENVTGLNNMTEPEKVVEAIAEADLVTTAIGPNILPRIAELIAQGIDARAEANCQKPLDIIACENMIGGSTFLAEEVAKYLKNPAYAEQWIGFPDAAVDRIVPLQKHEDPLFVQVEPFCEWVIDDTNRKAKEIQLEGVHYVADLEPYIERKLFSVNTGHATVAYTGALLGYQTIDEAMQDALVVAQLKSVLQETGKLLVAKWNFDEQEHAAYIEKIIQRFQNKYISDAITRVARTPIRKLGAQERFIRPIRELQERNLVSPHLLAMIGIVFNYHDPEDEQSRQLQEMLDQESVDTVIAEVTGIEDPETVKNIKQNVERYARPQVA

SEQ ID NO: 10596 - protein, 448 aa, Enterococcus faecalis
MMNKQRPLTANEEESYLALDQLLKKSPKLLDTPLSKELKETIQTIEAKGLSVILRKNARFPYYSDNLVEKSLSVHIPNYEMNNIMPTGTLDNAGRLYHYVKSDFHYLDGSNGSFIVLKRESSLFEFFTRWIIWMILLIILVAIAAAWLINKRLTKTTIEPLEALEKATKTLGKDAQKENPFTPTSHQTVSTEVKQLQLSFEQMWQDLEEANAEREKYEANRKELIANISHDLKTPITSIIGYVEGLMDGVANTEEKKQRYLTVIHEKSLGLNDLIEELFLYSKLDLDRAVFTMEKTNFTRFIAHILEEYRLEQELVITSVLPTEALYVQMDPTQMNRVITNLIQNSIKFADPTKEQLAFTISLTHNQTDLVLTITDNGIGIDKKELPYLFERFYRVDKSRTPTVKGSGLGLSIVKQIIDYHQGTITVTSKKGDGTNVIITLPLLEDEK

SEQ ID NO: 10597 - protein, 262 aa, Enterococcus faecalis
MEFKMNDFQLDGKVALITGAVYGIGFEIAKSLAEAGATIVFNNLSPESVEQGLENYRAAGIEARGYVCDVTDEEQVQAMVAQIKEEVGSIDILVNNAGIIKRIPMVDMSAEEFRQVIDVDLNAPFIMAKAVIPDMIEKGHGKIINICSMMSELGRETVSAYAAAKGGLKMLTKNIASEYGQYNIQCNGIGPGYIETPQTAPLREPGHPFNEFILGRTPANRWGTPADLAGPAVFLASNASDFVNGHILYVDGGILAYIGKQP

SEQ ID NO: 10598 - protein, 326 aa, Enterococcus faecalis
MKMSKNFWATLPKPFFVLAPMEDVTDVVFRHVVKEAGAPDVFFTEFTNSDSYCHPEGKDSVRGRLVFTEDEQPMVAHIWGDKPEFFREMSIGVAEMGFQGLDINMGCPVPNVAERGKGSGLILRPEVAAELIDAAKAGGLPVSVKTRIGFTEMAEMEAWITHLLEQDIANLSIHLRTRKEMSKVDAHWEVIPQIMAIRDRVAPQTTITINGDIPDRQKGLELAEQYGVDGIMIGRGIFKNPYAFEKEPKTHTPQELLGLLRLQLDLQDKYAELVPRSIVGLHRFFKIYVKGFPGASDLRAQLMNTKSTDEVRQLLATFEAEHGVLD

SEQ ID NO: 10599 - protein, 89 aa, Enterococcus faecalis
MAKKSKIAKAKKQQAMIAKYAPIRQALKEAGDYEGLSKLPKDAHPSRLKLRDQTDGRPRGYMRKFGMSRIRFRELAHQGLIPGVKKASW

SEQ ID NO: 10600 - protein, 589 aa, Enterococcus faecalis
MVELFILMMERVGLIILLAFLLVNVPYFKRVLLSREKMSSKVQLILIFGLFAIISNFTGIEIAKNQIVPNNLLTYLSSNASIANTRTLVIGVSGLVGGPIVGSAVGLIAGFHRVIQGGGHSFFYVPASLIVGLIAGFLGSRMAKQTVFPSAGFSAIVGACMEMIQMIFIFFFSGDLSDGATLVRFIALPMILLNSVGTFIFMSILTTTLKQEEQAKAVQTHDVLELAAETLPYFREGLNKNSSKKVAEIIKHYTKVSAISMTNSHQILAHVGAGSDHHIPELEVITELSREVLRTGRMTIAHAKEEVGCSDPNCPLQAAIVIPLFSHQQIVGTLKMYFTDPAQLTHVEEQLAEGLGTIFSSQIELGEAEVQSKLLKEAEIKSLQAQVNPHFFFNAINTISALMRKDSEKARKLLLQLSKYFRGNLQGAVQTTIPVSQELEQVKAYLSLEQARFPNRYQVTFDVEEAVASEKVPPYAIQVLVENTIKHAFGSRKENNQVRVVVKAKQHKLHVDVYDNGQGIPEERRLLLGKTTVTSEKGTGTALENLSRRMANLYGSEGCFLIENLETGGSHVHLEIPMEQEELDARINR

SEQ ID NO: 10601 - protein, 242 aa, Enterococcus faecalis
MHVLIVDDEPLAREELSYLVSQHPQVTSVAEADSVAEAMEEMMDQKPDLLFLDIHLTDESGFDLAEKLTHLKKAPYLVFATAYDQYALKAFQVNAKDYILKPFEEEKITQVIEKASKEMAQAVPENTAEKGPKSEAIPIQGEDRIYLVAPEDIYLVSVEERQLSIFVDQQVYKMTGTLNSIEQKLPATLFIKTHRSFILNRTKIQEIQPWFNNTLQVILTNGSKVPVSRSYVKEFKEKLGLS

SEQ ID NO: 10602 - protein, 181 aa, Enterococcus faecalis
MIEGKILNGIVCPTMSPGNSSVCQTSKTKLEERNVRTTYMAKAGEVERKWYVVDATDVPLGRLSAVVASVLRGKNKPTFTPHVDTGDFVIVINADKVKLTGKKATDKIYYRHSMYPGGLKSVTAGELRDKNSRRLIETSVKGMLPKNTLGRKQFTKLNVYGGAEHPHAAQQPEVLDITNLI

SEQ ID NO: 10603 - protein, 21 aa, Enterococcus faecalis
MVERKKPGLKKARKASQFSKR

SEQ ID NO: 10604 - protein, 705 aa, Enterococcus faecalis
MSEKKQVYRVEGLSCTNCAAKFEKNVSQIPKVTDAKVNFGAGKISIEGEATIAEIEAAGAFENLKVQSEHDTEPRIETKEPFVKRNWNLLVSLFLIILALGSQVVNGEDALLTEGLFILAIIIGGFSLFKEGFSDLLKLNFSMESLMTIAIIGAAIIGEWTEGSIVVILFAISEALERFSMDKARQSIRSLMDIAPKEALIRRNNVEQMINVSKIEVGDIMIIKPGQKIAMDGQVIKGHSSVNQAAITGESVPIEKNINDDIFAGTINEEGALEVKVTKHVNDTTIAKIIHLVEEAQGERAPAQAFVDKFAKYYTPTIMVIAALIVIVPPLFFNGDWNTWLYQGLSLLVVGCPCSLVISTPVSIVSAIGNSAKNGVLVKGGIYLEEIGGLKAIAFDKTGTLTKGTPTVTDFTTVDSKDEEKYFSIITALESYSQHPLASAILKEADNRAISYKSVVVDEFTSITGKGIQGNIEGITYLVGSPKLFESILTDNSKIIENYQRLQQQGKTAMLLGTDKQILAVIAVADELRESSKAVIEKLHDLGIEHTIMLTGDNATTAQSIGKQTGVTEIKGDLMPQDKLDYIKSLKETYGKVAMVGDGINDAPALAASTVGIAMGGAGTDTALETADVALMGDDLQKLPFIVKLSRQTLRIIKQNITFSLGIKLLALLLVVPGWLTLWIAILADMGATILVTLNGLRLMKVKSK

SEQ ID NO: 10605 - protein, 520 aa, Enterococcus faecalis
MTNVADLTSVEKIIVLDFGSQFNQLITRRIREFGVFSELLSHRTTAEEIRKIAPKGIIFSGGPNSVYDKDAFSIDPEIYELGIPILGICYGMQLMTHNLGGKVEPAANREYGKAELEILGDATLFQGTPAKQTVWMSHGDLVTEIAPGFEKVGTSNDCPIASIEDANRKFYGVQFHPEVRHSEYGNDLLRHFAFDVCGCTGDWSMENFIDMEVAKIREQVGDKKVLLGLSGGVDSSVVGVLLQKAIGDQLTCIFVDHGLLRKGEAEQVMESLGGKFGLNIIKVDAKERFLSKLAGVSDPEQKRKIIGNEFVYVFDDEATKLAGEEGVSFLAQGTLYTDVIESGTETAQTIKSHHNVGGLPEDMQFELIEPLNTLFKDEVRALGTELGMPDAIVWRQPFPGPGLGIRVLGEITEDKLQIVRDSDAILREEIAAAGLDRDIWQYFTVLPGIRSVGVMGDGRTYDYTVGIRAVTSIDGMTADFARIPWDVLQKISVRIVNEVAHVNRIVYDITSKPPATVEWE

SEQ ID NO: 10606 - protein, 202 aa, Enterococcus faecalis
MANHYYTENPELAHDLESWSFPLRGRTFQFTTDSGVFSRGTVDYGSRVLIDAFEWENLPAGRLLDVGCGYGPIGLSLAAATGRLVEMVYVNQRAVGLAQMNAQRNQITTVDIHSSNVYETLNETTYAAIVSNPPIRAGKKVVHGILTGAFPLLKVGGTLTVVIQKKQGAPSAEKKMAEVFGNVEIVTKDKGYYILRSVKEAE

SEQ ID NO: 10607 - protein, 433 aa, Enterococcus faecalis
MRMVDIIEKKRDGHQLTSEEIQFIINGYTDGSIPDYQVSAFLMAVFYQDMTDEEITQMTLAMVHSGEIVDLSSIEGIKVDKHSTGGVGDTTTLILAPLVASVGVNVAKMSGRGLGYTGGTLDKLEAIPGFKVELTEERFIQLVNDTKVAVIGQSGDLAPADKKLYALRDVTATVDSIPLIASSIMSKKIAAGADAIVLDVTTGEGAFMKDLASARRLAETMVRIGKLANRQTMAVISDMSQPLGEAIGNSLEIVEAIETLQGNGPEDLVEMCYVLGSQMVVLAKKAETLDEARALLEEALTSGRALAKFKEMIENQGGDSSVVDQPEKLLTATYQFDLPAKETGVVQKIVANEIGVAAMLLGAGRATKEDTIDFAVGLKLHKKVGSPVEKGESLLTIYANREDVTEVEQLLYKNIEIGPTGEEPILIHDIITE

SEQ ID NO: 10608 - protein, 513 aa, Enterococcus faecalis
MRKITKEFGTFKANDQIDLQVKPGEIHALLGENGAGKSTLMNILSGLLEPTSGEIYMNGEKVNITSPTAANRLGIGMVHQHFMLVEAFTVTENIILGSEPTHGGILDRKKAKKEIEEVSKQYGLDVNPNAYIRDISVGMQQRVEILKTLYRGANVLIFDEPTAVLTPQEIDELMIILKELTDEGKSIILITHKLDEIKKVADRCTVIRRGQSIGTVNVKDVSSQQLADMMVGRSVSFKTEKKPAQPKEIILSIKDLVVKESRGLDAVKNLSLDVRAGEVVGIAGIDGNGQTELIQALAGLTKVENGSIHLNEKEITNRKPREITEMGVAHVPEDRHKYGLVLEMTLAENIGLQTYYQKPYSSTGILNYRMINKHARELIEEYDVRTPNELVPARALSGGNQQKAIIAREVDRDPDLLIVSQPTRGLDVGAIEYIHRRLIEQRDKNKAVLLVSFELDEILNVSDRIAVIHAGEIVGIVDPKETTENELGLLMAGYSLEEARAELSKVEAGETVE

SEQ ID NO: 10609 - protein, 380 aa, Enterococcus faecalis
MKLLNNRSEKIRNILVPVLSVIMGFLLGAIIMVIFGYDPVAGYQAMFETAFQGKKSIGEIFVTAAPLIFTALGFSVANSAGFFNIGLSGQALCGWVASIWVALSMPDAPRMIALPVAIIVGAVAGALAAAIPGFLRAYFGTSEVIVTIMLNYILLYTGNHIANNVMKPSIMANKGITKMIGANASLRSPFLTSISDGSRLNIGIFLAFIFLILVWFLMKKTTLGFEIRSVGLNPFASEYAGMSSKRTIILSMMISGTLAGLGGAVQGLGTFQNFFIQNTSLSIGFDGMAVSLLGAGSSIGILLSALLFGMLKLGGQGMPLIAGVPTELVDVVIAAIIFFVGISYLIRFLLAKASGSKKEVAIVETIEAAPDKNNQEGGDI

SEQ ID NO: 10610 - protein, 268 aa, Enterococcus faecalis
MVMNYLEAEDLTTGYGRQVISEALNCSFEAGTITSIIGPNGCGKSTLLKTLARILPAEKGKVFIKNQELQHFSSKEVAQELAILSQTPENTIDLSVFDLVSFGRYPYQSGWKSVTAEDQEYIQWALELTGLTELARESVAILSGGQRQRVWIAMALVQDTDILILDEPTTYLDPAHQLEILNVLKRINQEHQKTIVMTIHDINLASRFSDRVIAMKEGKIINEGTPQEVITVTGLADVFAIQAEISYHSQTQRPLVLSYELMEMELDG

SEQ ID NO: 10611 - protein, 273 aa, Enterococcus faecalis
MLAVLAGAALGLSGAILQGITRNPLADTGILGINAGAGLAVILFISFVETTSITTFALPLVALVGGLLAAVGILVIAYHHRLGLTPVRMVLAGVILSTGISALTLLITSKIDTEKYRFVTMWQAGSIWGSNWFFVGALLPWLVIGFFFAMKRHRLLDILQLGDETAISVGIAVKKERIVSLLLAVMLAASAISVTGGINFLGLLAPHIARKCGFTQQKQVLPLAALFGSLLLLVSDTIGRLLPGNGEMPAGIIVAIIGAPYFLYLLIKTSDSL

SEQ ID NO: 10612 - protein, 140 aa, Enterococcus faecalis
MAKKVEKIVKLQIPAGKATPAPPVGPALGQAGINIMGFTKEFNARTADQAGLIIPVVISVYEDRSFTFITKTPPAAVLLKKAAKIEKGSGEPNKTKVATVSSDQVKEIAELKMADLNAADVEAAMRMVAGTARSMGIIVE

SEQ ID NO: 10613 - protein, 229 aa, Enterococcus faecalis; identical to SEQ ID NO: 5017

SEQ ID NO: 10614 - protein, 166 aa, Enterococcus faecalis
MSEAAIAKKETLVQAAAEKFESAASVVIVDYRGLTVEEVTNLRKQLRDAGVEMKVIKNSILSRAAKKVGLDGLDEVFTGPTAVAFSNDDVVAPAKIIDEFAKDAKALEIKGGVIEGKVSSVEQITALAKLPNREGLLSMLLSVLQAPVRNVAYAVKAVAEKNEEVA

SEQ ID NO: 10615 - protein, 122 aa, Enterococcus faecalis; identical to SEQ ID NO: 5019

SEQ ID NO: 10616 - protein, 208 aa, Enterococcus faecalis
MFFTFMRGVVRVILFVINGNAHYENKEKLPKDQNYVLVAPHRTWWEPLYLAVAGSPKKFSFMAKKELFKNPVLRFILKHANAFPVDREKPGPSAIKTPVKILKNSDLSLIMFPSGTRHSSELKGGVALIAKMGRVPIVPSVYQGPLTLKELFKRKKVTVRFGEPIDISDIKKMDKDGLAEVERRMQEAFDQLDKEIDPTFKYESTEKE

SEQ ID NO: 10617 - protein, 1045 aa, Enterococcus faecalis
MKPLSLTLKNFGPYINEIIDFTKFEDSSLFLISGKTGSGKTTIFDGMSYALFGESSGKLRLGKEMRSTFADPSEATEVTLLFKHNEYLYELNRLPEQELFKKRGTGVRKQSAKISLIVKDAQGKELRSYSKRREVDELIQELLHLNANQFAQIVLLPQGEFRTFLIAKSDEKEKVLRNLFGTELYQLFSENLKERLKIANQEIQETQQKIELKTEQLHWSEEPEPTMTLFEKLQLLESQQQEAQQQLLVEREQIATLKQAKQAKEQVRYAIEERQNLQQQKEELLEKKAKQVEQETVIERLKEQIQQLKWSQKQQSLAEKVFEKRSEKQQKEQETKSKQQALMETQQALTDWQAIMSELEEQQPLIAEKQERLQTIQRQLPQYQEYEQLAQQQIAEQANYQAIQKEYESCQQEKITLADKVATAKQFIEQEGTLEKANFECSSVADHWQNFVERWQKNQKAWQKISQNQVELHELTQRFAVEQQQKSAEEAKLQTKKSQWASLQIQRLSLLLEEGEPCPVCGSLEHPKQQTHQEVSLEEIDQAERELTEVEKTVQRFTETLSALGAEKQQKESQLQEQEAAYTEEQEQLAAQFADLQLPLTGLTFSQVTPAEIAEVESQLAKEKQQIAQKLTEISVEKDRLAELEEQVAENSQRFEVLRQQVETMQQSLERITIQQQMIASQLLDATVTYEEMTKQQALLQEELSAFERQKENVTTQGETLKKEEMILESTLTHLEKEQQTLQQTVAQLESQLNAVLTEQGVTEDQLTEWLKEVPTLESQQEQIALFEQEQTQLTIQLAEIEKKLSSDTFPELSLITTEIEQITQQIEEQEKKYYQLHEKMLNNQQLVQEINAQRTTIEDKFEEVAALQQLADTVNGNNPKKISFERYMLQTYLERVLTVANQRLDRLTNSRYQFELNHEAGSYRNQTGLEINIYDDNSGTVRSAHTLSGGESFIAALALALSLAEVIQEQAGGVLIDALFIDEGFGSLDEEALEMAMEALETIENEGRMIGIISHIGELKARIPQQLQIKSNGNGQSTVHYQLA

SEQ ID NO: 10618 - protein, 300 aa, Enterococcus faecalis
  VARIANT (1)...(300): Xaa = Any Amino Acid
MNTKAMLETLNEITLLVDEPLKNVTFTKTKXPADVLALPKTKKEVEEIVAYCREQGLSWLVLGNASNLIVRDGGIRDVVIMLTEMKEIKVAGTTMIVDAGAKLIDTTYEALAADLTGFEFACGIPGSVGGAVYMNAGAYGGEIKDVFQSAEVLLADGTIQTMTKEDLNFRYRHSEIQELHCIVLQATFALEKGNHAEIKAQMDELTELRELKQPLEYPSCGSVFKRPVGHFTGKLIQDAGLQGLKWGGAQISEKHAGFIVNIDHATATDYVELIAHIQEVIKEKFDVELQTEVRIIGEEV

SEQ ID NO: 10619 - protein, 571 aa, Enterococcus faecalis
MLKRFFGYYRPYRRLFILDFGCAVFAGLLELAFPVAVNQVIDKIMPKGDFRLIALASAGLFAFYIINTFLQFIVVYFGHMLGVNIETDMREELYQHLQTQPFEYYDNQKTGKLMSRLTTDLFEISEVAHHGPEDVFITIMTLAGSFLLMLTIHVKLAIATFILLPFITIALGYFNKKMTKANTDIYDNLGEFNAGIEASVSGIRVTQSFANEPFERKQFNYLNQMYRKSKLYFYKVMGVSSAYNYLLIRLINLFSLIFGAYYTIKGEITEGQFVGFILLANIFIRPIEKVNNMIESYPKGFAGFKRFTEEMDKQPSIKDLPGAVAVSHLEGTIAYKDVSFAYEDGTKVLDHINLKIQPGETVAFVGQSGSGKTTLCNLLPRFYEVSSGEITIDGRNIQQMTLASLRKQIGIVQQDVFLFPGTLRENIAYGNLNATEIDIQQAVKLAHLEHVIQLMPDGLDTIIGERGVKLSGGQKQRVAIARMFLKNPPILILDEATSALDTETEQVIQESLNSLADGRTTLIIAHRLATIKHADRIIVVSDQGILEDGTHETLYAQRGHYRRLYDAQFRT

SEQ ID NO: 10620 - protein, 234 aa, Enterococcus faecalis
MKFKEIEGSTMEREWELFLAPYEQAVSELKVKLRGIRKQFREQDKHIPIEFVTGRVKPVDSILTKTAIRHIPLNRIEEEMQDIAGLRIMCQFVEDIYQVVALLRNRKDLKIVEERDYIENKKESGYRSYHVVVEYPVQLVTGEKIILAEIQIRTLSMNFWATIEHSLNYKYQGVFPEEMKERLQRAAEAAYLLDEEMSSIREEIQEAQHYFSHGRGLLENEYYKQIKNETPENQ

SEQ ID NO: 10621 - protein, 265 aa, Enterococcus faecalis
MKVAIVHNSEEKSKQVTKQLTTLLEQNQIQIDNRQPELVISVGGDGTLLSAFHRFNHLLNEVSFLGVHTGHLGFYTDWRDYELKELVESLCIHREKSTSYPLLDVRIRFRDGKPDKHFLALNESTIKRGNRTMVGDVFIKDELFERFRGDGLSISTPTGSTAYNKSIGGAVLHPSINAFQLTEIASLNNRVFRTLGSPIVIAHTEWLEIKLQESDDYFVTVDQLDIYQENIASVCYRIADERIHFASYRHMHFWHRVKDAFIGED

SEQ ID NO: 10622 - protein, 297 aa, Enterococcus faecalis
MEFQWTYDKETTQQVKYFLKEQGVSKGLLAKVKFQGGKIQVNGTVQNAIYPLQTGDVVKMTIPDEAEHETLLTDDEPIEIVFEDDHFLVVNKPAGIASIPAQYHPSGTMANRVKGYYKRQNYVNQVIHVVTRLDRDTSGLMLFAKHGFAHALIDQELREKKVTKIYYALVGGAIEQLNEHQLIEKPIGRDLSSLLKRQVIETGQFASTEYWLAKRGAQAAAVRIQLHTGRTHQIRVHFEAIGCSLLGDEMYHGEMDQGIERQALHCMELIFTHPFTKETVHLISPLAEDMKSVDDTL

SEQ ID NO: 10623 - protein, 869 aa, Enterococcus faecalis
MVTLFGEDEEKAFIVGTVQAIFFENPSNFYKVVLVNVTDTNTDYLEKEIVVTGSFGQVQEEEPYRFFGHFVDHPRYGRQFQVDSYQQERPTSASGVVNYLSSDKFPGIGKRTAEKIVEVLGESAIDRIIDDPSVLEEVTVLNEKKRQVIVETIRLNHGMEQVIVGLNRYGFGSQLAFSIYQTYQEETLSVIQENPYQLVEDIEGVGFKRADNIAEQIGIQADSAVRIRAAILHEVFEHSIRSGNTYAQADVLLEEAIRTLEASRPVEISPDQVANEIITLVEHGKIQQEETKLFENSLYFSEWGIGTSIQRLLSRKKEIHYEEEEVQKNIRMIEKRLNIQYGDSQQAAIEEAIKSPLFILTGGPGTGKTTVINGIVSLFAELNGLSLDLKDYTQEMFPILLAAPTGRAAKRMNETTGLPASTIHRLLGLTGREKNPSLTAKELEGGLLIVDEMSMVDTWLANTLLKAIPTNMQVIFVGDKDQLPSVGPGQVLHDLLQINEIPKCELNEIYRQGDGSSIIPLAHEIKEGKLPADFQKNQKDRSFFASDIGHIEEYIRQIVTKAKAKGFTPQDIQVLAPMYRGAAGIDALNKMMQEIFNPNEGKKKEVKWNDTVYRIGDKVLQLVNTPELNVFNGDMGEIVGITLAKDSEDKVDELVLQFDNNEVTYKRNEWNKITLSYCCSIHKAQGSEFRMVLLPMVHQYSRMLQRNLLYTAVTRSKELLILLGEVSAFETCVKNESASRMTMLKERIVNAEQMTLTTRTQLEAYEEGLTADHPFTEKETKAVSYETEQQSTKANQIKDTDEQLVDTTVQEVSLFADEGEESTPETANKATKVVEEPLPKEPRLTVEIIQTNAVDPMIGMKDTTPYQFM

SEQ ID NO: 10624 - protein, 181 aa, Enterococcus faecalis
METFERNWYVLHTYSGYENKVKANIESRAQSMGMGDYIFRVVVPEETEKEVKNGKEKEIVHKTFPGYVLVEMIMTDDSWYIVRNTPGVTGFVGSHGAGSKPAPLLQEEINHILRSIGMSTRQSDLEVALGDTVKIIEGAFSGLEGVVTEIDEEKQKLKVNIDMFGRETSTELDFEQVDNID

SEQ ID NO: 10625 - protein, 265 aa, Enterococcus faecalis
MTMIDLKKNYQIMGIVNTTPDSFSDGGSYTTVDVAYQHALHLLEAGADILDIGGQSTRPGYEEVSPQVEADRVLPLIKKIRETSLAPISVDTYYPEVAEAAIQAGATMINDIKGLDTPGMAEVLAQYPEVQVVIMHSRKHQSLSLKEELHQFYTEKIEQCQKYGLSLEKICFDPGIGFHKTVAENLQLLKDPNAFRYQDYPLLYGVSRKRTIGALTNEPEPANRDFGSAAASLYAAQQGVEILRVHNVQGLKQTFDVWRALSEKE

SEQ ID NO: 10626 - protein, 1207 aa, Enterococcus faecalis
MKSLAGHVVKYGKHRERRSFARISEVLELPNLIEIQTDSYQWFLDEGLREMFEDILPIDDFQGNLSLEFVDYELKEPKYTVEEARAHDANYSAPLHVTLRLTNRETGEIKSQEVFFGDFPLMTEMGTFIINGAERVIVSQLVRSPGVYFHGKVDKNGKEGFGSTVIPNRGAWLEMETDAKDISYVRIDRTRKIPLTVLVRALGFGSDDTIFEIFGDSESLRNTIEKDLHKNASDSRTEEGLKDIYERLRPGEPKTADSSRSLLTARFFDPKRYDLANVGRYKVNKKLDLKTRLLNLTLAETLVDPETGEIIVEKGTVLTHQIMETLGEYIDNGLNSVTYYPSEDAVVTEPMTIQVIQVLSPKDPERIVNVIGNGYPDDSVKTVRPADIVASMSYFFNLMEDIGNVDDIDHLGNRRIRSVGELLQNQFRIGLARMERVVRERMSIQDTETLTPQQLINIRPVVASIKEFFGSSQLSQFMDQTNPLGELTHKRRLSALGPGGLTRDRAGYEVRDVHYSHYGRMCPIETPEGPNIGLINSLSSYAKVNKFGFIETPYRRVDRATGRVTDQVDYLTADIEDHYIVAQANSLLNEDGTFANDVVMARLQSENLEVAVDKVDYMDVSPKQVVAVATACIPFLENDDSNRALMGANMQRQAVPLIQPRSPWVGTGMEYKSAHDSGAALLCKHDGVVEFVDAKEIRVRRDNGALDKYMVTKFRRSNSGTSYNQRPIVHLGEKVEKGDTLADGPSMEEGEMALGQNVLVAFMTWEGYNYEDAIIMSRRLVKDDVYTSVHIEEYESEARDTKLGPEEITREIPNVGEDALKDLDEMGIIRIGAEVQDGDLLVGKVTPKGVTELSAEERLLHAIFGEKAREVRDTSLRVPHGGGGIVHDVKIFTREAGDELSPGVNMLVRVYIVQKRKIHEGDKMAGRHGNKGVVSRIMPEEDMPFLPDGTPVDIMLNPLGVPSRMNIGQVLELHLGMAARQLGIHVATPVFDGATDEDVWETVREAGMASDAKTVLYDGRTGEPFDNRISVGVMYMIKLAHMVDDKLHARSIGPYSLVTQQPLGGKAQFGGQRFGEMEVWALEAYGAAYTLQEILTYKSDDVVGRVKTYEAIVKGEPIPKPGVPESFRVLVKELQSLGLDMRVLDIEEAEIELRDMDDDDDDLITVDALTKFAEQQSAKQLEKEAESVVKEEAQDVVQEIETAEDRD

SEQ ID NO: 10627 - protein, 1208 aa, Enterococcus faecalis
MQIGLASPEKIRSWSYGEVKKPETINYRTLKPEREGLFCERIFGPTKDWECACGKYKRIRYKGIVCDRCGVEVTRSKVRRERMGHIELAAPVSHIWYFKGIPSRMGLVLDMSPRALEEVIYFASYVVIEPGDTTLEKKQLLTEREYREKREQYGQAFKAAMGAEAVKQLLDNVDLDGEVAQLKEELKTASGQKRTRAIRRLDILEAFRASGNQPSWMVMDVIPVIPPDLRPMVQLEGGRFATSDLNDLYRRVINRNNRLKRLLDLNAPSIIVQNEKRMLQEAVDALIDNGRRGRPVTGPGNRPLKSLSHMLKGKQGRFRQNLLGKRVDYSGRSVIVVGPFLKMYQCGLPKEMAIELFKPFVMRELVQREIATNIKNAKRKIERGEDEVWDILEEVIQEHPVLLNRAPTLHRLGIQAFEPVLVEGRAIRLHPLVCEAYNADFDGDQMAVHVPLNEEAQAEARMLMLAAQNILNPKDGKPVVTPSQDMVLGNYYLTMEEEGREGEGMIFRDMNEAVLAWQNGYVHLHSRIGVQTTLLGDKPFTDWQKERILITTVGKIIFNEIMPVEFPYLNEPTDYNLTVQTPDKYFVEAGTDIPAHIKEQELVLPFKKKNLGNIIAEVFKRFHITETSKMLDRMKDLGYKHSTYAGMTVGIADIMVLHEKQAIIDAAHKQVETITKQFRRGLITDDERYERVIGVWNGAKDEIQQKLIESMEARNPIFMMSDSGARGNISNFTQLAGMRGLMAAPNGRIMELPIISNFREGLSVLEMFISTHGARKGMTDTALKTADSGYLTRRLVDVAQDVIIREDDCGTDRGLEIEAIREGNEIIEPLDERLLGRYTRKSVVHPETGAIIIGADQLITEDLAREIVDAGIEKVTIRSVFTCNTKHGVCKHCYGRNLATGSDVEVGEAVGTIAAQSIGEPGTQLTMRTFHTGGVAGDDITQGLPRIQEIFEARNPKGQAVITEVTGEVIDISEDPATRQKEVTIKGKTDTRTYTVPYTARMKVAEGDIIHRGAPLTEGSIDPKQLLQVRDVLSVENYLLREVQRVYRMQGVEIGDKHIEVMVRQMLRKIRVMDPGDTEILPGTLMDIAEFKDRNYDTLVAGGVPATSRPVLLGITKASLETNSFLSAASFQETTRVLTDAAIRGKKDPLLGLKENVIIGKIIPAGTGMARYRNMEPKEVGVASENVYSISDIEAQMAAEDAMKNINK

SEQ ID NO: 10628 - protein, 831 aa, Enterococcus faecalis
MDELFTESAKAVLAIAQEEAKYFRHQSVGSEHLLLALVLEPNGIAGKTLRQLNTDTEDIREEIEHLSGYGTMQSPMGNNNLYLPYSPRAKQIFAYAGDEAKRLGAQKIGTEHLLLGLLRDEEILASRILVNLGLSLSKMRQLLLKKMGVSEPNGAQRRRNGQSKNAPQGTPTLDSLARDLTKLAREQSLDPVVGRGTEVRRLIQILSRRTKNNPVLVGEPGVGKTAIAEGLAQKIVNREVPEDMQGKRLMMLDMGALVAGTKYRGEFEDRLKKVVDEIYQDGQVILFIDELHTLIGAGGAEGAIDASNILKPALARGELQTIGATTLDEYQKYIEKDAALERRFARIQVAEPTPEEAEEILKGLRSRYEKHHGVEITDEALHAAVQLSIRYLNDRQLPDKAIDLMDESAAKVRLDKADQPSEINELRTEISQLITEKEEAIQNQSFESAARIRQKEKQVMEKLEELIAVKEKSLSGYSTQVTEEDVAGVVSQWTGVPLQQLEKKESERLMELETILHQRVVGQNEAVEAVSRAIRRARSGLKDPARPIGSFMFLGPTGVGKTELAKALAEAMFGSEEALIRVDMSEFMEKYSTSRLIGSPPGYVGYEEGGQLTEKIRQRPYSVILLDEVEKAHPDVFNILLQVLDDGHLTDAKGRKVDFRNTILIMTSNLGATAIREEKHVGFNVKDISKNHELMQKRIMEELKKAFRPEFLNRIDETVVFHSLKQEEIHEIVKIMSQSVVKRMAEQEVKVKITPAAIEVIGKVGFDPEYGARPIRRALQKEVEDRLSEALLSGQIQLGDKVTLGASKGKITLNVRAPKAPKTEAKELQTV

SEQ ID NO: 10629 - protein, 415 aa, Enterococcus faecalis
MKVMTERTLKRPEVLAPAGTLEKLKVAIRYGADAVYIGGNAYGLRSRAGNFTPEEMAEGVAFAREHNAKVYVAANMVTHEGNQEGAGAFFRELRDIGISAVIVSDPALIEICATEAPGLPIHLSTQASATNYETLEFWKNEGLERVVLAREVSMEEVAAIRKNTDIEIEAFIHGAMCISYSGRCTLSNHMSMRDANRGGCSQSCRWKYELFDMPFGTERRSKTSEGEVEEEFSMSAVDMSMIEHIPELIENGVDSFKIEGRMKSIHYVSTVANVYKKAVDSYMEDPENYVCQQEWIDELWKVAQRELATGFYYNTPSENEQLFGERRKIPQYKFVGEVIAYNEKTQVATIRQRNLFSVGDEIEFYGPGFTHFHQTVKEMYNEDGEAIDRAPNPMMLLTMEVTQPVAVGDMIRKKK

SEQ ID NO: 10630 - protein, 293 aa, Enterococcus faecalis
MTNFSQQHLPLVEKVMVDFIAEYTENERLKEAMLYSIHAGGKRLRPLLVLTTVAAFQKEMETQDYQVAASLEMIHTYSLIHDDLPAMDDDDLRRGKPTNHKVFGEATAILAGDGLLTGAFQLLSLSQLGLSEKVLLMQQLAKAAGNQGMVAGQMGDIEGEKVSLTLEELAAVHEKKTGALIEFALIAGGVLANQTEEVIGLLTQFAHHYGLAFQIRDDLLDATSTEADLGKKVGRDEALNKSTYPALLGIAGAKDALTHQLAEGSAVLEKIKANVPNFSEEHLANLLTQLQLR

SEQ ID NO: 10631 - protein, 322 aa, Enterococcus faecalis
MRQMMTEEFRHYTVLLKETVDGLQVKPDGVYVDCTLGGAGHSEYLLTQLNEHGHLYAFDQDQKALAHAKTRLQKYVDKGQVTFIKSNFRNIKEELAEHGVFHVDGILYDLGVSSPQLDEAERGFSYHQDAPLDMRMDQDAPLTAREVVNTYSYSELVKIFFRYGEEKFSKQIAREIERVREKQPIETTGELVEIIKTAIPAPARRKGGHPAKRIFQAIRIAVNDELGAVEESLEQAIDLLAKNGRISVITFHSLEDRIVKTMFKEYSTVQDLPPGIPVVPEEFQPELKVITRKPILPSDSELSENNRSRSAKLRIAEKIKSR

SEQ ID NO: 10632 - protein, 135 aa, Enterococcus faecalis; identical to SEQ ID NO: 4988

SEQ ID NO: 10633 - protein, 95 aa, Enterococcus faecalis
MLLTMNFNYVAHKKGGGSTSNGRDSESKRLGAKSADGQTVTGGSILYRQRGTKIYPGVNVGIGGDDTLFAKVDGVVRFERKGRDKNQVSVYPVAN

SEQ ID NO: 10634 - protein, 742 aa, Enterococcus faecalis; identical to SEQ ID NO: 4989

SEQ ID NO: 10635 - protein, 321 aa, Enterococcus faecalis; identical to SEQ ID NO: 4990

SEQ ID NO: 10636 - protein, 456 aa, Enterococcus faecalis; identical to SEQ ID NO: 4991

SEQ ID NO: 10637 - protein, 368 aa, Enterococcus faecalis
MKCEKMKILVTGGGTGGHIYPALSFVEHVKKEAPATEFLYVGTENGLESQIVPKAKIPFKTIKIQGFKRSLSPQNFKTIYLFLTSINKAKKIIREFQPDVVIGTGGYVSGAVVYAAHQLKIPTIIHEQNSIPGMTNKFLSRYVDKIAICFSDVASFFPKEKTILTGNPRGQEVVTVEKSAILSEFGLDPAKKTVVLFGGSRGALKINQAFEQAFPLFEEREYQVLYASGERYYQELQESLKLSEKKLTNISVQPYIDKMVEVMANTDLMVGRAGATSIAEFTALGLPAILIPSPYVTNDHQTKNAQSLVKVGAVEMIPDAELTGARLVAAIDDILLNNEKRQQMATASKGEGIPDASDRLYQVVKTLV

SEQ ID NO: 10638 - protein, 374 aa, Enterococcus faecalis
MWKISNENDIFKKRKPLPPKKSEESQPELTPWQKQNQEYLKKQAEEAASKGENEQAEVTITLQEQSQEEPQQHLPQETVEEEEHFADRLPNVKKTRNKRLYRRLAFILTCLGTAILVALYFVSPLSRLSEVTVSGNKSVESQAIIQQSKLETGSGLWEQYSNRNYFSANIQKKFPIIKKANIKLNGINSFKIDIQEYQIVALAATKGGYHPILENGKTLAETTKAAESGKPIFENFKEDKLIPELMVSYNKLPQEIKQGISEIKYAPSKTNKDLINVYMNDGNRVIVNISDLSEKMAYYSQVAEQMDKPGIVDMEVGIFSYPYEKESEETGSEVSEDSAVENQEVVDPNAGVATDEANNGTPTNGENQEVQQAE

SEQ ID NO: 10639 - protein, 410 aa, Enterococcus faecalis
MEFSLDNNINNGAVIKVIGVGGGGGNAVNRMIEENVKGVEFITANTDVQALKHSKAETVIQLGPKYTRGLGAGSQPEVGQKAAEESEQVISESLQGADMIFITAGMGGGTGTGAAPVVAKIAKELGALTVGVVTRPFSFEGPKRGRFAAEGIALLKENVDTLLIISNNRLLEVVDKKTPMLEAFREADNVLRQGVQGISDLITAPGYVNLDFADVKTVMENQGTALMGIGVASGEERVIEATKKAISSPLLETSIDGAEQVLLNITGGLDMTLFEAQDASDIVTNAASGDVNIILGTSINEDLGDEIRVTVIATGIDESKKDRKPHRQTRQAVQPMQQTTQSVEMDQPKSQEEASAFGDWDIRREQNTRPKVDESSLEQVDKKEFDTFHREEPNHNDDELSTPPFFRRKR

SEQ ID NO: 10640 - protein, 225 aa, Enterococcus faecalis
MIAENLTNINNQLQLACKSSQRSVADVTMIGVTKSVGIEEAAELVQLGVQNLAENRVDKLLEKKAGLEKFNDIQWHLIGNLQRRKVKLIINEIDYFHALDSLSLAKEIQKRATKVIRCFVEVNITGEESKHGFRKEDVLPFIQELADLDKIQIVGLMTMAPFGASEEVLHATFRELKELQMTVNEKHLSFAPCTELSMGMSNDFPIAVEEGATFIRIGTALFRDA

SEQ ID NO: 10641 - protein, 234 aa, Enterococcus faecalis
MQLLYESEQRYSEMRKGEEFMSIFNKDALSSFFGLSGEEDDYYDNYEEYEERKAVNEPPRRAARPKPQRPVQQQESYSQPAYTQQSEPVVEKPSARYRSAEAHQERDTQQAAYTEKKVVSMRSSNQSATTNTRRAQESTANAKTHKITIIEPRVYSEAMSIAKHLFAEEAVLVNFTLVEEDQARRIVDFLTGTVYALDGDIQRVGNEIFLCTPANMEIDSATAQSLANKQFFDF

SEQ ID NO: 10642 - protein, 233 aa, Enterococcus faecalis
MALTPLDIQNKDFSTKMRGYNQDDVDDFLDQVTRDYEDALQKNRELEKSLKHAEEKLQYFNELKDALNQSIIVAQDTADKVKSSANKESEMIITSADNQAKETLVEAERKSNAMIADAEAKSTQILAEAIERARQLAGETEDLKKKTRVFHQRLSLMLETQLEQVKSEEWEEILKPFSSYVGDKHTAVKEILDEQDLDNENETVVNSEENTDAVVEKKPVIEVTEETIEEESK

SEQ ID NO: 10643 - protein, 933 aa, Enterococcus faecalis
MKARQMHMKMKETLQLGKTAFPMRGNLPNREAEWQKDWEEKGLYEQRQKLNEGKPTFVLHDGPPYANGNIHLGHSLNKISKDIIIRSKSMSGFRSPYVPGWDTHGLPIEQVLTNKGVKRKEMTVAEYREKCKEYALSQVDKQRNDFKRLGVSGDWEHPYITLDPEYEAAEIRVFGKMAEKGYIYKGLKPIYWSPSSESSLAEAEIEYKDVKSPSIYVAFNVADGKGLLDNETAFVIWTTTPWTLPANLGISVNPDFTYVEVKADGRKFVIAKDLLTTVKEAIGWEEVEVLREFSGEKLDRMTAQHPFYDRTSLVMLGDHVTLDAGTGLVHTAPGHGEDDYIVSRKYDLPVISPVDSRGVFTDEAPGFEGIFYDKANPMITELLEEKGALLKLDFFTHSYPHDWRTKKPVIYRATPQWFASISKFRQDILDEVEKVDWLIPWGKTRLYNMIRDRGDWVISRQRAWGVPLPIFYAENGEAIITPETIEHVANLFAEHGSNIWFMREAKELLPAGFTHPGSPNGEFTKETDIMDVWFDSGSSHEGVLREREELTFPADMYLEGSDQYRGWFNSSITTSVAINGVAPYKSIISQGMVLDGEGRKMSKSLGNTILPEKVINQMGADILRLWVSSVDAEADVRVSMDILNQVSEVYRKIRNTMRFLLANTSDFNPAEHTVAYADLRSVDKYMTVRLNQVIQEIRENGYEKYNFMHIYRTVMNFLTVDLSSFYLDFAKDVVYIEAENDYQRRCMQTVFYQTLVSLTKLLTPIIPHTAEEIWSFLQEEEEYVQLAEFPGYETFTNEEELMDTWAAFMDFRDNVLKALEEARHSKLIGKSLEAKVTVYPNEQIRQLMTAVDADIAQLLIVSDFEVSKEVAPSEAVQFEDMAILVEKAEGETCDRCRSVRQDVGSDEKLPTLCGRCAHIVEENYPEAVAEGFE

SEQ ID NO: 10644 - protein, 507 aa, Enterococcus faecalis
MNEKVALFTIFGGTGDLAKRKLYPSLFRLYKKGLLAERFAVIGTARREWTDEYYREIVRETIQDLNPTAKEATEFSSHFYYQSHNVNDTEHYNTLKELSDRLNEQYHLEGNHVYYLAMAPQFFGTIVNHLKSQHIISEEGFDRLIIEKPFGSDYESAYELNEEIRAAFPEQDIFRIDHYLGKEMIQNISAIRFANNIFESQWNNRYIDNVQITFAESLGVEDRGGYYDHSGALKDMVQNHILQVVALLSMEPPVAFSEKEIRTEKVKALRAIRLYSEEEALQNFVRGQYGEGQLADQTFAAYRDEPNVAETSSTETFVAGKFLIDNFRWSGVPFYVRTGKRLTEKGTRINIVFKQVPINVFKDDTCEECDKTDLPPNVLTIYIQPTEGFSLTLNGKEIGQGFNTTPVKLDFRQSAEMTENSPEAYEKLLLDCLNGDSTNFSHWDEVAQSWRIVDIIRHAWDKTDVSFPNYAAGTMGPQAAFDLLEKDGFTWEWQPDNWYRDRGQLDQ

SEQ ID NO: 10645 - protein, 354 aa, Enterococcus faecalis
MMARVEKLRELMKENNLQGFLVTSPYNLRYLTNFTGTTGLAMIALDKAFFITDFRYTEQAAEQATGFTIVKNTGHIFDEVADLAERLQLDNLAFEETQVSFADYSLLEEILPCELVPVMGLIEELREVKDEEEVAIIEKACAIADQGFAFVLEMIKPGMTEIEVANQLDFFMRSKGASGVSFETIVASGLRSAMPHGVASHKVIEKGELITLDFGCYYEGYVSDMTRTFAIGSIQPKLKEIYDIVLEAQLKVLAEAKPGLTGIQLDAIARDHIASYGYGDAFGHSTGHGIGLEIHEGPNVSFRADKQFVPGNVITDEPGIYLPGIGGVRIEDDLSITAEGNRVLTHAPKELIIL

SEQ ID NO: 10646 - protein, 106 aa, Enterococcus faecalis
MDGQQNLEAIMGLIMYGGNAKSDAMEAIAAAKSGGFELADKKIADAEESLVHAHHSQTGMLTEEAKGNNMQVTLLTVHSQDHLMTAIAFTDLAKEIIDLYRRIDNE

SEQ ID NO: 10647 - protein, 464 aa, Enterococcus faecalis
MKYQFPENFWWGSAASGPQTEGVFEGDGKGQNIWDFWYQEAPEKFFQQVGPDKTSQFYKKYQEDIQLMKETGHNSFRTSIQWSRLIPDPTTGKVNQTAVDFYNQVIDDLLEHGIEPFMNLYHFDMPMVLQEKGGWESREVVDLYVDFAKTCFELFGDRVKKWFTHNEPIVPVEGGYLYGWHYPDKVNLKEGIQVLYHEALASAKAIAVYHSMNLSGEIGIILNLTPTYPRDEHNEADVNAAKFVDGFFNRSFLDPAVKGHFPEDMVAWAKANDLLPETTPEDLAIIAENTVDLLGVNYYQPRRAKAKETPVETRPEGLLPEDFYDVYDMPGKKMNPYRGWEIYEKGIYDTLMNLKENYGNIRCYISENGMGVEGEERFVNEQGVIEDDYRIEFVQDHLKWVHQAIQEGSNVQGYHMWTCMDNWSWLNAYKNRYGFIAVDLDDDAKRTIKKSGRWFKEMTANNGF

SEQ ID NO: 10648 - protein, 1109 aa, Enterococcus faecalis; identical to SEQ ID NO: 4930

SEQ ID NO: 10649 - protein, 320 aa, Enterococcus faecalis
MKRIGILTSGGDAPGMNAAIRAVVRKSIFDGIEVYGINYGFAGLVAGDIRRLDVADVGDKIQRGGTFLYSARYPEFATEEGQLKGIEQLKKFGIEGLVVIGGDGSYHGAMALTKRGFPAVGIPGTIDNDIPGTDFTIGFDTAINTVLESIDRIRDTATSHVRTFVIEVMGRNAGDIALWSGVAGGADEIIIPEHDFDMKNVAKRIQEGRDRGKKHCLIILAEGVMGGNEFADKLSEYGDFHTRVSILGHVVRGGSPSARDRVLASKFGSYAVELLKEGKGGLCIGMLDNQVVAADIIDTLENNKHKPDLSLYELNHEISF

SEQ ID NO: 10650 - protein, 516 aa, Enterococcus faecalis
MKKTKIVCTIGPASESVDMLVNLINAGMNVCRLNFSHGDYEEHGARIKNIREAVKITGKRVAILLDTKGPEIRTNDMENGAITMKIGDSVRISMTEVLGTNEKFSITYPELINDVNVGSHILLDDGLIDLEVTDIDRDANEIVTVVKNEGVLKNKKGVNVPGVSVNLPGITEKDANDIRFGIGQGIDFIAASFVRRASDVLEITKILEEENATHIQIIPKIENQEGIDNIDEILKVSDGLMVARGDMGVEIPTEDVPVVQKALIKKCNALGKPVITATQMLDSMQRNPRPTRAEANDVANAIYDGTDAVMLSGETAAGDYPLEAVQTMARIAVRTEETLVNQDSFALKLYSKTDMTEAIGQSVGHTARNLGIQTIVAATESGHTARMISKYRPKAHIVAITFSEQKARSLSLSWGVYATVADKPSSTDEMFNLASKVSQEEGYASEGDLIIITAGVPVGEKGTTNLMKIQMIGSKLVQGQGVGEEAIIAKAVVAGTAEEAVAKATEGAILVTKTTD

SEQ ID NO: 10651 - protein, 448 aa, Enterococcus faecalis
MTQQYLTVTALTKYLKRKFDADPYLGRVYLTGEISNFRFRANAHQYFSLKDDHAKISAIMFKSAFQKLKFQPKEGMKVMVVGRISLYENSGSYQIYIEHMEPDGVGALYQALAELREKLGKEGLFEGPKQQLPRYPKRIAVVTSPSGAVIRDIITTVKRRYPIAQLVLFPTLVQGEQAADDIVRNIQRADAQGDFDTMIIGRGGGSIEDLWPFNEEKVARAIHAATTPIISSVGHETDVTIADMVADVRAATPTAAAELAVPVLNEELLRISERRSRLEQSFLYLLQQRTERFQRLQNSYVFKQPERLYEGQTIKLDRMTQRLFQAMTTIHHQKQRQAQGIIAQLQQQTPKGQLRESQQQLAFLQRNLQTQMTQLFLNKQKQFTSAVQQLDLLSPLKIMGRGYSYTTKEDRVVKTVTELQPADQLTIHYADGTVQANVETITAKKEEF

SEQ ID NO: 10652 - protein, 230 aa, Enterococcus faecalis
MDGYKKEANQLMFQKDQSFLQKYGKFYLNGAGYTIFLAFIGVLFGAILGALLALMKLANSKILRGIAIAYIEYVRGTPLLVQIFIVYFGTGVLGLDLSKVAAGCIALSLNSGAYVAEIIRAGIQAVNKGQLEAARSLGMNQNQAMRYIIFPQAIKNILPALGNEFVTVIKESSVVSVIGVSELIFQAGNVQGASFKPFLPYLIVSLIYFVLTFTISRLLGVAERRMSTSD

SEQ ID NO: 10653 - protein, 381 aa, Enterococcus faecalis
MTEPAIRYRLIKKDKHTGARLGELITPHGTFPTPMFMPVGTLATVKTMSPEELKEMGAGVILSNTYHLWLRPGEDLVEEAGGLHKFMNWDQPILTDSGGFQVFSLSDMRKIEEEGVHFRNHLNGSKMFLSPEKAINIQNKLGSDIMMSFDECPPFDESYEYVKRSIERTSRWAERGLKAHANPDRQGLFGIVQGAGFEDLRRQSAKDLVSMDFPGYSIGGLSVGESKEEMNRVLDFTTPLIPENKPRYLMGVGAPDSLIDGVIRGIDMFDCVLPTRIARNGTCMTSQGRLVVKNAQYARDFRPLDEKCDCYVCRNYTRAYIRHLIKCDETFGIRLTSYHNLYFLLDLMKNVRQAIMDDIYLEFRQAFFEEYGFNKANAKSF

SEQ ID NO: 10654 - protein, 867 aa, Enterococcus faecalis
MNMVKTVKKEKTETVDVSSMIDELATKANVALKAMEDFTQEQVDHIVHQMAMAALDQHMPLAKMAVEETGRGIYEDKAIKNMYASEYIWNNIKHDKTVGVINKDEQTGLMEIAEPVGVVCGVTPTTNPTSTTIFKSLIALKTRNPIVFAFHPSAQKCSAEAARIVRDAAIAAGAPENCIQWIEQPSIDATSALMNHPGIAIVLATGGAGMVKSAYSTGKPALGVGPGNVPAYIEKTAKVKRAVNDLIVSKSFDNGMICASEQAVIVDKEIYASVKAEFEAHNVYFVKPNELQKLEDAVMNEGKYAVNPAIVGNSAEKIAELAGISVPKGTKILVAELEGAGPEYPLSREKLSPVLAMMKSNNAEHAFELCEAMLNLGGLGHTAVIHTEDEELQVAFGLRMKACRILVNTPSAEGGIGNIYNEMIPSLTLGCGSYGKNSVSKNVSAINLINIKTVAKRRNNMQWFKLPPKIFFEKNSLQYLQKMENVERVMLVCDPGMVQFGYADIVRKELQKRKNDVKIEVFSDVEPNPSTNTVYAGTKMMVDFQPDTVIALGGGSAMDAAKGMWMFYEHPDTEFFGAKQKFLDIRKRTYKIAKPEKTQFVCIPTTSGTGSEVTPFAVITDSETHVKYPLADYALTPDVAIVDPQFVMSVPASVTADTGMDVLTHAIESYVSVMASDYTRGLSLQAIKLVFDHLENSVKRPDMESREKMHNASTMAGMAFANAFLGICHSIAHKIGGEYGIPHGRTNAILLPHIIRYNAKDPSKHAMFPKYDYFRADTDYADIAKFLGLKGNTTAELVEALATAVADLGKSVGIDMNLKAQGVSQETLDTTVDRMAELAYEDQCTTANPKEPLISELKQIILDAYVG

SEQ ID NO: 10655 - protein, 356 aa, Enterococcus faecalis
MVKRSVRRSMNRKDEHLSLAKAFHKEKSNDFDRVRFVHQSFAESAVNEVDISTSFLSFQLPQPFYVNAMTGGSQRAKEINQQLGIIAKETGLLVATGSVSAALKDASLADTYQIMRKENPDGLIFANIGAGLGVEEAKRALDLFQANALQIHVNVPQELVMPEGDRDFTNWLTKIEAIVQAVEVPVIVKEVGFGMSQETLEKLTSIGVQAVDVSGQGGTSFTQIENARRKKRELSFLDDWGQSTVISLLESQNWQKKLTILGSGGVRNSLDIVKGLALGAKSMGVAGTILASLMSKNGLENTLALVQQWQEEVKMLYTLLGKKTTEELTSTALILDPVLVNWCHNRGIDSTVFAKR

SEQ ID NO: 10656 - protein, 368 aa, Enterococcus faecalis
MIEVTTPGKLFIAGEYAVVEPGHPAIIVAVDQFVTVTVEETTDEGSIQSAQYSSLPIRWTRRNGELVLDIRENPFHYVLAAIHLTEKYAQEQNKELSFYHLKVTSELDSSNGRKYGLGSSGAVTVGTVKALNIFYDLGLENEEIFKLSALAHLAVQGNGSCGDIAASCYGGWIAFSTFDHDWVNQKVTTETLTDLLAMDWPELMIFPLKVPKQLRLLIGWTGSPASTSDLVDRVHQSKEEKQAAYEQFLMKSRLCVETMINGFNTGKISVIQKQITKNRQLLAELSSLTGVVIETEALKNLCDLAESYTGAAKSSGAGGGDCGIVIFRQKSGILPLMTAWEKDGITPLPLHVYTYGQKECKEKHESKR

SEQ ID NO: 10657 - protein, 341 aa, Enterococcus faecalis
MDSIIRGEKVMLSGKARAHTNIALIKYWGKANEEYILPMNSSLSLTLDAFYTETTVTFDAHYSEDVFILNGILQNEKQTKKVKEFLNLVRQQADCTWFAKVESQNFVPTAAGLASSASGLAALAGACNVALGLNLSAKDLSRLARRGSGSACRSIFGGFAQWNKGHSDETSFAENIPANNWENELAMLFILINDGEKDVSSRDGMKRTVETSSFYQGWLDNVEKDLSQVHEAIKTKDFPRLGEIIEANGLRMHGTTLGAVPPFTYWSPGSLQAMALVRQARAKGIPCYFTMDAGPNVKVLVEKKNLEALKTFLSEHFSKEQLVPAFAGPGIELFETKGMDK

SEQ ID NO: 10658 - protein, 318 aa, Enterococcus faecalis
MAEEKKVLLEVTGLKQYFNVGRKDEVKAIDDISFHIFEGETFGLVGESGSGKSTTGRSVIRLYDPTAGEILFDGKDISKIKSKADMQAFRRDVQMIFQDPYASLNPRMKVNDIIAEGIDVNGLAKTPKEREEKVNELLKTVGLNPSHSTRYPHEFSGGQRQRIGIARALAVNPRFIICDEPISALDVSIQAQVVNLLQDLQKEQGLTYLFIAHDLSMVKHISDRIGVMHSGKLLEMGTSDDVYNFGVHPYTESLLSAIPLPDPDYERTRKRIVYQPAAADGKDRELREILNGHYVYCAEDEVAMYRVKIEEKKRKAGL

SEQ ID NO: 10659 - protein, 173 aa, Enterococcus faecalis
MTIAKDMMVNDGIRARELRLIGQDGEQLGVKTKAEALQIAESANLDLVLVAPGAKPPVARIMDYGKFRFEQQKKEREARKKQKVINVKEVRLSPTIDVNDFNTKLRNARKFLEKGDKVKASIRFKGRAITHKEIGQKVLDRLAEETADIATVEQKAKMDGRSMFLTLAPKNDK

SEQ ID NO: 10660 - protein, 66 aa, Enterococcus faecalis; identical to SEQ ID NO: 5027

SEQ ID NO: 10661 - protein, 117 aa, Enterococcus faecalis
MLKVEQITRKRRKKVLKLAKGYYGSKHTLFKSAKEQVMNSYYYAFRDRRQKKRDFRKLWIARINAAARMNGLSYSKLMHGLKLAEIDINRKMLANLAVNDAAAFTALSEQAKDALSK

SEQ ID NO: 10662 - protein, 463 aa, Enterococcus faecalis
MSIFRKKEITVPVNDSGGMKKNLKTMDLIFLGIGAVVGTGIFVVTGVAAERYAGPGLVLSFLVAAAAIILSGLCYAEFASRIPVIGGPYAYMYVVFGEIVAWMTGWMIICEFFLAVSSVASGWSGYVHGFLDSLGFSLPQALSGAYNPTNGTYIDLIAMLVVVAVTFWVSLEAKTALRLNNLMVFVKFGIILLFVLVGIFYVKPTNWQPFIPYGFSGVFSGAALVFFAFLGFDAVSMAAEEVKNPKKDIPKGIIGSIIISTLLYIVVTLVLTGIVPFTDLGVKDPVAFAMRFINHGAIATIISVGAILTLLTVTIAMMYSLARVIYAISKDGLLPQFMSKIDEKRHTPKNATYVAGFLAMVFAGIVPMEMLAELTNIVTLFYLMFLALGIIKLRTMKGEPQAGEFKVPLVPVLPLISIVVCAALMFQLSLATWQVFGIAVVIGLAIYFFYGRHHSIVRFETKE

SEQ ID NO: 10663 - protein, 677 aa, Enterococcus faecalis
MTKGGFFCMSQKETFYITTPIYYPSGKLHIGNSYTTIACDAMARYKRLMGFDVFYLTGVDEHGQKIEKKAAELNVTPKEYVDKMAADVQKLWKTLDISYDKFIRTTDDYHMAAVQQIFDRLVEQGDIYLGEYEGWYSVSDEEFFTETQLAEVYRDDEGNVIGGKAPSGHEVELVKEESYFFRMSKYADRLVQYYEEHPEFIQPESRKNEMLNNFIKPGLEDLAVSRTTFSWGIPLKNDPKHVVYVWIDALSNYITALGYGSEDDSLFQKYWPANVQMVGKEIVRFHTIYWPIMLMALDLPLPKKVFGHGWLLMKDGKMSKSKGNVVYPEMLVERYGLDALRYYLLRAIPFGSDGVFTPEDFVSRLNYDLANDLGNLLNRTIAMINKYCDGKVPAYASKVTPFDSELSTTAANVIGKYHEAMEKMEFNTAIAEIWTLVSRANKYIDETAPWVLAKEEEKRNELESVMIHLAESLRIVAILLQPVMTETPGKIFEQLGLDPETMNMENIHFGEFPTDVTVTSKGTPIFPRLEIETEVTYIQKKMSQSESATEEDIKWNPEETTLVSTKEKQIKYDDFDKVELKVAEVIDCKKVKGADKLLQFRLDAGDENHRQILSGIAEFYPDPAALIGKKVVIVANLKPRKMRGQISQGMILSAESPEGKLQIVEAPKEMPNGAGIA

SEQ ID NO: 10664 - protein, 256 aa, Enterococcus faecalis
MIFDTHTHLNAEQFNDDIPETIAHAQELGVTEMAVVGFDEPTIEKSLLLSQEYANIYSIIGWHPTEAGSYTPEVERRLQEQLTLPKIVALGEIGLDYYWMEDPKEVQEKVFRRQIAIAREMNLPFSVHTREALEDTYRILKDEKISDIGGIMHSFSGDAEWMKKFLDLGLHISFSGVVTFKKALDVQEAAMAVPLERMLVETDAPYLAPVPYRGKRNEPGYTRYVVEKIAELRQLTFEEVAEQTRVNAHRLFRIDK

SEQ ID NO: 10665 - protein, 194 aa, Enterococcus faecalis
MKEKMKVAEIIVVEGKDDTRRIQEVVAADTIETIGSAINDEILTQIEHAQETRGVIIFTDPDYSGEKIRKTIMEVVPDAKHAFLSRKVAVPKKNGGSLGVEHASDEAIIEALKKVVTPVQADEDYQEIPRQTLVEYGLIAGANAKKYRELLGDDLRIGYTNSKQLVKRLSMFRITEAELKESMTRILKELANEE

SEQ ID NO: 10666 - protein, 295 aa, Enterococcus faecalis
MTDYKEIATPSRTKEILKKHGFSFKKSLGQNFLTEPNILRKIVETAGINQQTNVVEVGPGIGALTEQLAMNAAQVVAFEIDDRLIPVLADTLSRYDNVTVVHQDVLKADLVETTNQVFQEKYPIKVVANLPYYITTPIMMHFLESSLDVAEMVVMMQKEVADRIAAKPGTKAYGSLSIAVQYFMEASVAFIVPKTVFVPQPNVDSAIIKLTRRATPAVTVTNEKEFFKLTKASFQLRRKTLWNNLTHFYGKDEQTVAWLKESLAEAEIDPSRRGETLSLEEFARLSNALEKNKPV

SEQ ID NO: 10667 - protein, 310 aa, Enterococcus faecalis
MDEEDIKMKQLQFGTSDETVSSVILGCMRLNGAENPQQVIETAYDHGITFFDHADIYGGGDCETIFGKALKESTIRREDIFIQTKCGIRQGFFDFSKAHILEAVEGSLQRLGVDSVDALLLHRPDTLVEPEEVAEAFHLLEKQGKVRYFGVSNQTPGQIELLKTAVKQPLLANQLQFGIKHTGMVDQGLQTNMEISGSIDYDHGILDYSRLKQMTIQAWSPYQYGYFEGVFIGNEKFPELNQKLSELAEKYQTTPTGLASSWILRHPANMQVIAGSMNLGRIEEIAKAADIVISREDWYDIYRAAGNVLP

SEQ ID NO: 10668 - protein, 882 aa, Enterococcus faecalis
MTKKKLLLVDGNSVAFRAFFALHNSLERFKNKNGLHTNAIYAFNNMFENVMQKEMPTHVLVAFDAGKTTFRTEFYSEYKAGRSKTPGEFKEQMPYIRELLEGLGVKYYELPNYEADDIIGTLANKVDKDEFDVVVLSGDRDLTQLATDTVKVDITVKGVSDIESYTPEHIAEKYDGLTPKQIIDMKGLAGDTSDNIPGVTKIGEKTAIKLLKQYGSVEGVYENIDEMKKSKMKENLINDKEQAFLSKRLATIEVNAPVEVNVEDLAYEGKNLEKLVPFYKEMDFKQFLAKLDITEEPVEMEDILFEVVEDQLTNEMFTDDMALYVEMMEDNYHTSPIVGLAWGNNKKMYTTNNLAVFESQPFIDWLMDETRKKNVYDAKRTYVALNRYVGKMTGIAFDVLLAAYLLDTNDNNADIEGVAQHYGYDAIQSDEAIYGKGAKKGLPEDEEVFFGHLARKIKAIQFLTSKLDSELTEKNQADLFYKMELPLSRILGDMEITGIRVDATRLKEMQVEFSERLKEIEEKIYAEAGEEFNLNSPKQLGVILFEKMGLPVIKKTKTGYSTAVDVLEQLKEQAPIVADILTYRQIAKIQSTYVEGLLKVIQPDNKIHTRYVQTLTQTGRLSSVDPNLQNIPIRLEEGRKIREAFVPREDNWLIFSSDYSQIELRVLAHISNDEHLKEAFVEGQDIHASTAMRVFGVEKAEDVTPNMRRQAKAVNFGIVYGISDYGLSQNLGITRKQAQQYIDTYFEKYPGVKQYMEEIVRDAKDKGYVETLYHRRRYLSDINSRNFNLRSFAERTAINTPIQGSAADILKIAMIEMARRLKEEKLQATMLLQVHDELVFEVPESELEQLNQLVKEVMEHAVSLHVPLITDSSWGKTWYEAK

SEQ ID NO: 10669 - protein, 341 aa, Enterococcus faecalis
MYDGFCKYKTGGFIVELFDSLKFKVVRRNIKIVFPEATDPRILGAAARLKSDELVEPILIGDPTDIANAAMARGINTSNFIIINPNDYEKWDEMVEAFVERRNGKATKEDAEKILKDVNYFGTMLTYMGIADGMVSGAIHSTGDTVRPALQIIKTKPGVSRTSGAFLMIRGRDQERYLFSDCAINVNPTAQELAEIAVDSAKTAELFDIEPKVSLLSFSTKGSAKAPEVTKVAEATKIAQELAPEYAIDGELQFDASYVSSVAQLKAPNSKVAGEATVFVFPDLQSGNIGYKIAQRLGNFEAIGPILQGLNKPVSDLSRGANEEDVYKLSIITAAQTLMND

SEQ ID NO: 10670 - protein, 339 aa, Enterococcus faecalis
MAKMAITVKDVAKKAGVATSTVSRVINDHPSISESTKKKVRKVMDDLGYVPNMTARNLGKRISSAIGVILPPLDSKERLGNPFYLEIMEAINEEARLYDMTTAIATAKSFDVLLENVKRMHLQKQVDGFILVYSDSKDPVIDYLYENNIPFTLIGQPYQHETEIVYVDNDNQLLGKQATEFLIENGHKNILFVTNTTHESLYFERYFGYQKAMMMQGLTVLPSVALEKPEDYMAFDDILHQNNATALVVIDDIFALRTMQLAQIYGYQVPETLSIISFNNSIFSTLTHPYLTSIDIDTSELGRMAMKKLYELIHEELTNGVRLVIPHKLIKRETVIPIH

SEQ ID NO: 10671 - protein, 106 aa, Enterococcus faecalis
MLYSMYAIIKTGGKQVKVEVGQAIYVEKLNVEAGEKVVFDEVILVGGESTKVGAPTVAGATVEGTVEKHGKQKKVVTFQYKPKKHSHRKQGHRQPYTKVMIEAINA

SEQ ID NO: 10672 - protein, 41 aa, Enterococcus faecalis
MLTTVNQEQKNIAQILLENLLLGLQSIENENTEFIQITTIT

SEQ ID NO: 10673 - protein, 561 aa, Enterococcus faecalis
MKVNIKNNETGVFAIGGLGEIGKNTYGVQFQDEIIIIDAGIKFPEDDLLGIDYVIPDYSYIVQNLHKVKALVITHGHEDHIGGVPYLLRQANIPIYAGPLALALITNKLDEHGLLREAELHEINEDTVIRFRKTAISFFRTTHSIPDALGVVVKTPSGNIVATGDFKFDFTPVGEPANLHRMAKLGEEGVLCLLSDSTNAEIPTFTKSEKTIGTSILKIFEKIDGRIIFASFASNIFRLQQAADAAVKTGRKIAVFGRSMENAIVNGERLGYIKVPKGTFVDAAELNQLPANETMILCTGSQGEPMAALSRIANGTHRQISIQPGDTVVFSSSPIPGNTTSVNRLINLLSEAGAEVIHGKINNIHTSGHGGQEEQKLMLRLMKPKYFMPVHGEFRMLKIHASLAQDTGVPEENCFIMGNGDVLALTADSARPAGHFNANDVYVDGNGVGDIGNVVLRDRRILSEEGLVLAVATVDIKNKEIMAGPDILSRGFVYMRESGDMIHEGQRLLFNALREAMKDKNCTEAKLGEAMTTALQPFLFEQTERHPMILPMIMTATVSDQ

SEQ ID NO: 10674 - protein, 383 aa, Enterococcus faecalis
MMKKIKVMTVFGTRPEAIKMAPLIKVLEEQSQGFDSVVVVTAQHRQMLDQVLEDFQITPNHDLNIMKDGQTLTDITSRVLNLLTEVLVTEQPDIVLVHGDTTTSFAAALAAFYQQIPVGHVEAGLRTWQKYSPFPEEMNRQLVDVLTDIYFAPTTQSKDNLIKENHPEEHIYVTGNTAIDAMAYTVDAHYQNDLLEKIPTDQRIVLITMHRRENLGLPMANVFKAVRRLVMEHPEIEVIFPMHKNPKVREIVAEHLGELARVHLIEPLDVKDFQNFAAKSALILTDSGGVQEEAPSLGVPVLVLRDTTERPEGVAAGTLKLVGTDEQVVYQEAKTLLTDSDAYHAMAHAQNPYGDGQASRRIVEAIAYEMQKSDKKPDTFTAK

SEQ ID NO: 10675 - protein, 880 aa, Enterococcus faecalis
MSEEKNLPTKYQPTEIEAGRYQKWLDQDLFKPSGDKKAKPYSIVIPPPNVTGKLHLGHAWDTTLQDMIIRQKRMQGFDTLWLPGMDHAGIATQAKVEEKLAQQGISRYDLGREKFVDQVWEWKEEYASHIREQWAKMGLSLDYSRERFTLDEGLSEAVRKVFVSLYEKDLIYRGEYIINWDPKAKTALSDIEVIHKDIEGAFYHMSYPLSDGSGVVEIATTRPETMLGDTAIAVHPEDERYQELIGKTVVLPLVDKEIPIIADDYVDMEFGTGVVKITPAHDPNDFEVGNRHDLPRVNVMNEDGTMNELAGKYEGMDRFAARKAIVSDLKELGRLIKIETMNHSVGHSERTGVVVEPRLSTQWFVKMGPLAEKAMKNQETEDAVEFYPPRFNQTFLRWMENVHDWVISRQLWWGHQIPAWYHKETGEMYVGMEAPADSENWVQDSDVLDTWFSSALWPFSTMGWPDEASEDYQRYFPTSTLVTGYDIIFFWVSRMIFQSLEFTGERPFQNVLIHGLIRDEQGRKMSKSLGNGIDPMDVIEKYGADALRWFLSNGSAPGQDVRFSYEKMDASWNFINKIWNASRFVIMNVEGMTAADIDFSGEKTVADRWILTRLNETVARVTELFDRFEFGEAGRQLYNFIWDDFCDWYIEMSKEILYGDNEAAKQTTRSILVYTLDQILRLLHPIMPFVTEEIWEKIPHQGESLVVAEYPVVHEEFNDEAAARGMEVLKEVIRSVRNIRAEVNTPLSKPITLLIKTNDTEVEEFLTANTSYLERFCNPEELVISREIEAPELAMSAVLTGAELFLPLAGLINIEEEIARLEKELDKWTKEVKRVQGKLSNERFVSNAPDEVVEAERAKEKDYLEKQEAVKERIAQLRSI

SEQ ID NO: 10676 - protein, 367 aa, Enterococcus faecalis
MTDRISRRMISLYASLSTFIVILITLFSYFHSIKQNRWLLELLQRKVFYLPLIVHIVLISLLIGLLTFLLISLVQKGQYGRIEEKLRLLANGNYESPVLNKPTTSENQDHYLTEVEQDIWSIKNKLLEMSKELQLLNSRPQLMDGQTKEEILENERHRLARELHDSVSQQLFAAMMMLSALNEQAQRTETPEPYRKQLAMVAEIINASQSEMRALLLHLRPISLEGKSLRKGIEQLLKELQTKIKIELIWDVEDVHLNSSIEDHLFRIVQELLSNTLRHAKAKELEVYLHQVDKNVLLRIVDDGVGFDMKEQSNKAGSYGLNNIRERVVGMGGTVKIISFKGQGTSVEIKVPVIKEETASDQSNVSG

SEQ ID NO: 10677 - protein, 306 aa, Enterococcus faecalis
MKRKSTYYTACTARYMMISENVKGANQMITSLADTVTLNNGTKIPGMGLGVFQIPDEETAKVVEEGIINDYRLIDTAQIYGNESGTGAGIKAGLAATGLNREDLFVTSKVWNAHISYDETIQAFNDSLERLGLDYLDLYLIHWPGNNSYKESWQALETLYAEGKVKAIGVSNFQVHHLEDLLSYAKVVPVINQVELHPKLDQKEVRDFCEKHDIKVQAWSPLMQGQLLSNETILAIAENHNKSAAQVILRWDIQQDILLAVKSVHKERMISNAAVFDFELSAEEMAQINQLNESLRVGPDPDTFDF

SEQ ID NO: 10678 - protein, 423 aa, Enterococcus faecalis
MEGDNMNIIDELAWRDAINQQTNEEGLRELTENTSISLYCGVDPTGDSMHIGHLIPFMMMKRFQLAGHHPYILIGGGTGTIGDPSGRTTERVLQTMEAVQHNVDSLSNQMKKLFGKDAEVTMVNNYDWLSELSLLDFLRDYGKNFNVNTMLAKDIVASRLESGISFTEFTYQILQSIDFYTLHKKHNIQLQIGGADQWGNITAGLDLIRKKEGPEAKVFGLTIPLMLKADGTKFGKTAGGAIWLDPKKTSPFEFYQFWLNQDDRDVIKYLKFFTFLDKEEIDALAEKVEKEPGKREAQRRLAEEVTRFVHDDAALEEAQKISEALFSGNIKDLTIEEIEQGLEHVPTVEITKDAKNIVDWLVDTEIEPSKRQAREDVSGGAISINGDRVTDLDFAVDPTQHFDGKFVVVRKGKKNYFLAKVMD

SEQ ID NO: 10679 - protein, 506 aa, Enterococcus faecalis
MTISLFAIRDCLEKEDLLKEFISPEGWHLTLSDTLGQREVTALSYDSRDVTAETLFFCKGLNFKEIYLENAVKDGLEIYVSEVPYEVPAQLGIIVTDIKKAMAVLSMAFYDYPQNKLKLIGFTGTKGKTTAAYFTKYILDVATQQKTALLSTMNSTLDGKTFFKSALTTPESLDLYRMMATAVANGMTHFIMEVSSQAYKTNRVYKLFFDVGIFLNITPDHISPIEHPTFDDYFYCKRQLITHSKVIVLNHEADYFPLLKETAQQQKVPAIVYGSQPAPEVDYSFAVSSEDSLRFIVESPADALGLAGSYHLRLGGDFNKGNALSAAIASVLVGASKEECQQGIAATTVPGRMESLTNTNGATVYVDYAHNYDSLKNLLTFVREEHPDGRLIVLVGSTGDKAISRRKDFGTVLSELADVAVLTTDDPASEDPAKICQEIQAHITKEMPVYTVLDRGEAIAHALSLSTTADDAIVLAGKGADLYQKVNGVDEPYAGDFALAKMIIDK

SEQ ID NO: 10680 - protein, 549 aa, Enterococcus faecalis
MINQPNSVDQPILTNQEKMVKGSAWMTASNIISRMLGAIYIIPWYAWMGEHGNEANSLFSMGYTIYALFLMISTAGIPGAIAKQTSHYNSLNEYKISRQLFYRALQLMGGLGVVFAIVMYLASPALAALSGGGPELVPTMRSLSLAVLVFPSMSVIRGYFQGNQEMMPFALSQIVEQVARVFYMLLTAFIIMKVFEGNYVTAVTQATFAAFIGMLASFAVLGYYMYKQKPLFDYLEEHSANEHEIAPKELLIETFKEAIPFIVVGSGVTVFKLVDQFTFSNFMRLFTDYSDTQLRELFGIFNANPDKLTMIVVALATSISATGLPLITEAVTLKNHRELARLISNNLQLFVFVMLPATFGMIVLAQPLYTVFYMPDALGTSLLVQACYASLFLGLYMLVSNMLMGMYENRDAMRYLGIGLAVKLIVQFPAIRLFEVYGPLLATMIGFTVSCVLILRRIRQVTRFNYKLTLRRTLLMFCITVIMMIIALIFRQFLYLFLDPTRRFQAFIIVVIVAAAGGAFYGYSVLKIRLADRLLGKNAAKLRAKFNIK

SEQ ID NO: 10681 - protein, 257 aa, Enterococcus faecalis
MSQAIFLKERGMTMRLDKFLADVGIGSRKEIKQLLKKKVVTVNGDVVKEAKTQVNEETDQIALMGEILTYQKFFYYMLHKPQGVISATEDQRDETVIDLLTDQDYRADLFPVGRLDKDTEGLLLLTNDGQLAHQLLSPKKHVDKEYLAEVEGLVTVEDCQLFAQGFALKDGEMVKPSRLVIETINEEEGTSVVRLVIQEGKFHQVKRMLATVGKPVTYLKRLRMGELWLDETLELGEYRPLTEAELQQLQPKQSYLN

SEQ ID NO: 10682 - protein, 471 aa, Enterococcus faecalis
MTIDWTKEVEARKDDLLEDLQNLLRINSERDDAQATPEAPFGPGPVAGLKHMLAYGERDGFTVKNVDNYAGHIEYGEGDETLGIFGHMDVVPAGDGWETDPYEPVIKDGKIYARGASDDKGPSMAAYYAMKIIKELGLPVSKKIRFVVGSDEESGWGDMDYYFQHEEAPDFGFSPDAEFPIINGEKGNVTIRLTFRGGNGADYKLESFKSGLRENMVPGTADAVVTAASADEAASLAASFETFIKQEAKISGNAELSDKTVTFHVVGKGAHGASPQSGINAATFLATFLNDYSFAEGAYSFINTIAEFIHEDFYGEKLGVAFEDEKMGKLTMNAGIVNFDPENPENSLVTLNFRYPKGTSAEELQAKVQATVGETVTATQGDRNQEPHYVPVDDPLVATLLQVYEDHTGEKGQEQIIGGGTYGRLLKRGVAYGAMFPGYTDTMHQANEFMELDDLFRAAAIYADAIYRLAK

SEQ ID NO: 10683 - protein, 390 aa, Enterococcus faecalis
MSRVDRYKHIHEKSRPAEHKKTFNPRKSMGEHREEEPEELAESLQEPVYEDSYTEDSRRSERRHQTDSGGGNGSDQPPRGKKDKKPKKKRKKSKTKRFFKWLVILLILLFAYSTVMFLKGKSAAEHDDSLPQEKVETFNGVKSSNGAKNILILGSDTRGEDAGRADTIMVLQLNGPSKKPKLISFMRDTFVDIPGVGPNKINAAYAYGGAELVRETLKQNFNLDTKYYAKVDFQSFEKIVDSMFPKGVKIDAEKSLNLDGVDIEKGQQVMDGHVLLQYARFRMDEEGDFGRVRRQQQVMSAVMSQMKNPMTLLRTPESLGKLVGYMSTDVPVSFMLTNGPSLLIKGKAGVESLSVPVPDSWNFGESSYAGSILEVDEQKNADAIEKFLNE

SEQ ID NO: 10684 - protein, 388 aa, Enterococcus faecalis
MRFITAGESHGPELTAIIEGLPAGLPLSSEEINRELARRQGGYGRGGRMKIEKDQVRITSGIRHGKTLGSPVTLIVENKDWKNWTSVMSVEPVPEKQKKIRRVSKPRPGHADLVGGMKYQHDDLRNVLERSSARETTMRVAIGAVAKKLLAELDIQVAGHVAVLGGIEATIPENLTIREIQERSEQSAVRVLDPSVEEKMKELIDQTKKNGDTIGGVVEVLVGGVPAGLGSYVQWDRKLDAKIAQAVVSINAFKGAEFGIGFEMAQRPGSQVMDEIVWDESTGYTRTSNNLGGFEGGMTNGMPIIVRGVMKPIPTLYKPLQSVNIDTKEPYKASVERSDSTAVPAASVVCEAVVATEVAKAMLEKFDSDSFEQMKEAVQRYRLYTQNF

SEQ ID NO: 10685 - protein, 288 aa, Enterococcus faecalis
MKEITGATRLAGLFAKPSQHSISPLIHNTAFQNLGVDARYLAFDVGQETLPQAIEAIRTFHMLGANLSMPNKVAAVSYMDELSPTAQLVGAINTIVNKDGKLYGDSTDGTGFMWSLKEKKVDVFQNKMTILGTGGAALSIIAQAALDGVKEIAVYNRKSAGFNDSQKKLANFTERTNCVIHLNDLADTEKLAKDVAESVLLVNATSVGMHPHAHSSPIENYAMIQPKLFVYDAIYNPRETQLLKEARLRGAETSNGLDMLLYQGAAAFEQWTGQKMPVSVVKRKIENR

SEQ ID NO: 10686 - protein, 406 aa, Enterococcus faecalis
MKLTTIPNEFKEAAPVIREINAQGFEAYFVGGSVRDALLNKPIHDVDIATSAYPEEIKQIFKRTVDVGIEHGTVLVLMEDQQYEVTTFRTESTYQDFRRPDEVTFVRSLKEDLKRRDFTINALALDSTGEIIDLFDGIEDLTNQTIRAVGNPHERFHEDALRMMRGLRFASQLDFKIEEKTLAAIAEFHPLLEKISVERITIEFVKMLLGVNRQGGLAPFIETECYQYCPKLREQGAGLFRLMDLPARQIETEAEAWTLLIQSLNLPEAEIRSFLKAWKLSNQLIQNVSQLVRGLRFRLSNDWQPMMLYELGEESAVLVERLLYYYQQESQVQVTKELVKALPIHQRHELAITGKDLLAVLEETPGKWLGELIAEIEQHVVKGNLENKQEVLLSFAKKQRSKGEKA

SEQ ID NO: 10687 - protein, 263 aa, Enterococcus faecalis; identical to SEQ ID NO: 4911

SEQ ID NO: 10688 - protein, 91 aa, Enterococcus faecalis; identical to SEQ ID NO: 5022

SEQ ID NO: 10689 - protein, 225 aa, Enterococcus faecalis
MVDTYFESEEGQKFLMIDTSGMRKRGKVYVSTETYSVMRAMRSIERSDIVLMVLNAEEGIREQDKRVSGYAHEAGRGIIIVVNKWDTVKKDTNTMRDFEAEIRDEFQYLDYAPIIFVSALTKQRLNKLPELIETVSMNQNLRIPSALLNDVVMDAVAINPTPTDKGKRLKIFYATQVAVKPPTFVIFVNEEELMHFSYARFLENQIRKAFTFEGTPIKIIPRRRK

SEQ ID NO: 10690 - protein, 472 aa, Enterococcus faecalis
MIKMAEQTDLLILGGGTGGYVAAIRAAQKGLNVTIVEKYKLGGTCLHKGCIPTKALLRSAEVFDTLKQAASFGIETEAASIDFSKIQQRKEGIIEQLHKGVEGLCKKNKIKILAGEGAILGPSIFSPVSGAVAVTFNDPTREEEIIVPKNVIIATGSSPKTLPNLPLDEEFILSSDGMLELEELPESIAIIGGGVIGVEWASLLNSLGVNVTIIEFLDRLLINESATISKELKKRLEQRGINILLGSKVQEAKVTGQKVQVEVAGQESLTVDKVMVAIGRQPNINKLGLQNTSVKYTDKGIEVNEFYQTTEGHIYAIGDCIDTLQLAHVAMKEGELAVQHLLDETVEPLNYTNVPRGVYTNPEIASVGYTRETLPADKEVVIGTFNFNGNGKSLVYGETDGFIEVIRDKKTDDLLGVSMIGPHVTDLIAEASTAMYLDAAPIEIGEAIHAHPTMTEVLQEAALDTYGLAIHK

SEQ ID NO: 10691 - protein, 330 aa, Enterococcus faecalis
MKMKTLKKSGLSKEELIQAYRQVLRGRRLDERLWQLTRIGKTSFNISGQGAEVAQVAMAMAFNPQKDYFLPYYRDMTACLVWGMTSKDILMGSFGKEADPSSHGRQMPNHYGSKEHNIVSFSSTVSTQMPLATGVGYAAQLQKADFVALTTTGEGSANQGEVQEAMNFAGVKKLPVIFVVENNEYAISVPIEEQYANKRMADRAKAYGFEGVTVDGSDFAEVYLAFKEAVKAARGKKGPKLIELMVSRLTSHSADDDQSVYRSKEEIEEMKKNDAVKLFEKQLLEEGYLTDEDIAKIDEEIRAEINQATDEAEAMPDPVPTSILEEVYAK

SEQ ID NO: 10692 - protein, 328 aa, Enterococcus faecalis
MAEMTYLEAINLGISEEMARDEKVVIFGEDVGGDKGGVFGVTKGLAAKYGDERCFNTPLTEGLIGGLAVGLGLMGYRAIGEFQFADYILPATNQLLSEARTMRYRTKGDWTAPIVYRTPYGGGVRGGLYHSQSTEKVFCGQPGLRVVTPSNPYDAKGMIKAAIRSDDPVIFYEHKRLYRLLKDEVPADDYIVPIDKANVVRTGSDLTVISYGMTLQLALAAAEKLAAEGIDAEIVDVRSLYPLDRETLVAAAKKTGKVLLVTEDNKEGSVMSEIAAMISEDALFDLDAPIQRLAGPDCPSMPYALPLEREFLINEEQVLAAMKELAEF

SEQ ID NO: 10693 - protein, 432 aa, Enterococcus faecalis
MATKEIKMPHLGESVTEAAIVQWLVKPGDSVKRYDPLMEVVSDKVTTEVPSDFDGVVKEFLISLDTDVPIGTAVMTLETEETTEKTEVATLAPVKEASAEQAQEHETVATTSTATSHQKNNGRYSPAVLKIAQEKKIDLTQVTGTGRDGRITRKDVTNFTPTQARTPEKTVSPGTSPSISEEPVASQNESAATASPTETSPDKIVSADPVRKAIAKKMVQSVNEIPHAWLMVEADVTNLVQLRNSLKDEFKQQEGLSLSFFPFFAKAVIQALKKNPKINTSWDDGSIIYHKDVNLSIAVTTDEHLYVPVIQQADNYSIAGLAKEINRLAQEVRQGTLASKEMQGGTFTLNNTGTLGSVQSMGIINHPQAAILQVESINKRLVPTADGGFKVADMVNLCLSIDHRILDGQQAGKFLRDVKDNLAKYNADTDVY

SEQ ID NO: 10694 - protein, 292 aa, Enterococcus faecalis
MLKKGFEQIMTIQWFPGHMAKARREVSEKIKYVDIVFELVDARLPLSSRNPMMDQIVQQKPRLVLLNKGDLADNDQNKKWQHYFQKKGYQTLVINAQQNKGINKIVPAAKEALKEKLAREQAKGLKPRAIRAMCIGIPNVGKSTLMNRLVGKKIAQTGNKPGVTKGQQWLRSGSQLELLDTPGILWPKFEDEEIGKKLALTGAIKDQLLHLDDLAIYGLEFFARFYPQRLTERYGLTEEELFLPAPEQLMLISQKRGFRDDYNRASEMIILEIRSGKLGTYTLDRWEELGDE

SEQ ID NO: 10695 - protein, 692 aa, Enterococcus faecalis
MAYKYLVIVESPAKAKTIEKYLGRNYKVVASVGHIRDLPKSKMGIDIENNYEPHYISIRGKGDVIKSLKAAAKKAEKVYLAADPDREGEAIAWHLAYLLGLDLKDKNRVVFNEITKEAVKAAFKEPRTINVDLVDAQQARRILDRLVGYSISPILWRKVKKGLSAGRVQSVALKMIIDRENEIREFKPEEYWSIDGNFQKGRKKFKANFWGVDGKKKKLPNAEAVKEITSRIDGKDYDVTKVEKKERKRNPALPFTTSSLQQEAARKLNFRTRKTMMVAQQLYEGIALGKQGTVGLITYMRTDSTRIADSAKAEAAEFIEKTYGDEFSAHGGRKAKNTQGAQDAHEAVRPSSVLRTPDEMKKYLDKDQLKLYTLIWSRFVASQMTPAILDTMKVTLQQNGVTFIANGSKVKFKGFMQVYVEGRDDGKEDKENILPELVESDVVKSVDIEPKQHFTQPTARFSEATLIRTLEENGVGRPSTYAPTLETIQRRYYVKLTNKRFEPTELGEIVNSLVSEFFPQIVDTHFTATMETDLDKVGEGQEKWVEVVDRFYKPFEKELTNAEEKIEKIQIKDEPAGFDCELCGHPMVIKLGRYGKFYACSNFPDCRNTKAIVKEIGVTCPVCHEGQVIERKSKKNRIFYGCSRYPECDFTSWDKPVGRPCPKCGQYLVEKKVKGGKQVVCINGDYGENVQN

SEQ ID NO: 10696 - protein, 435 aa, Enterococcus faecalis
MPKKVTIIGAGLAGSEAAWQVANAGVPVDLYEMRPVKKTPAHQTENFAELVCSNSLRGNSLTNAVGVLKEEMRRLNSIIIGSADQTAVPAGGALAVDRDSFSETITEKIKSHPLITIKNEEITDIPEGIVIIATGPLTSESLSQKIQEFNGSEGFYFYDAAAPIIDKSTIDMDKVYLKSRYNKGEAAYLNCPMTEEEFNAFHEALVNAEVVPLRTFEKEKFFEGCMPIEVMAQRGIKTMLFGPMKPVGLEDPKTGKRPYAVIQLRQDNAAASLYNIVGFQTHLKWGEQKRVFRMIPGLENAEFVRYGVMHRNSFMNSPELLKPTYQSKKRDDLFFAGQMTGVEGYVESAASGLLAGINAARLAKGEEPIEFPRETTLGSMAYYITHAEGKHFQPMNANFGLFPELPERIRDKKERYEAIANRALDVQAQVIQSLD

SEQ ID NO: 10697 - protein, 299 aa, Enterococcus faecalis
MEEKNWPELFARYLIVERGYSEKTKKAYQEDIQHFFSFLKTSGNDNYLTVEHLDVRAYLSELYDQEYSRNSISRKIASLRSFYQFLLKNEAIQENPFSYVHMKKKQLRLPRFFYEKEMDALFESAQGEQPLDLRNQALLEVLYGTGIRVSECANLTVDAVDFQASVLLVHGKGNKDRYVPFGSFAQDALKDYLENGRALLMTKYQKKHPYVFVNHHGEQITPTGIEYVLNQLIKKSSLNAEIHPHMLRHTFATHLLNNGADMRTVQELLGHANLSTTQIYAHVTKESLQKNYRTFHPRA

SEQ ID NO: 10698 - protein, 194 aa, Enterococcus faecalis
MHNGGKRLGGTIMVESQFHSTTICAVEKDGKFAMAGDGQVTMGESVVMKGTAKKVRRIYNDEVVVGFAGSVADAFTLEEKFEGKLNEYNGNLTRAAVELAQEWRTQQSMQKLEAMLIVMNKEEMLLVSGTGEVITPDDGILAIGSGGNFALSAARAMKNFGDKEMPAKEIAKNALNIAADICVFTNHNIIVEEL

SEQ ID NO: 10699 - protein, 326 aa, Enterococcus faecalis
MLLISMSMLFLGIKIGSVQISLTDLLQILVKKTVSEDGILEGIIWNVRLPRVVMAYLVGAGLAVSGTVMQSLLGNPLASSYTLGVSAGASLGAALIMVTGVTASILGAFLLPLTGFIFGLATVFLVLLFTQTMDSQMSNQTVVLVGMIMTLFVGAILTLITALFQDYLKQLVFWQMGSFSGSNWQKIAIYCPILLVSSLFLWFDANALDVLGLGEEHAMLAGVEVKTAKLRIILLASLLAGSAVSFVGVIGFVDLIAPHIVRRYLGATHRWLIPGSAILGGTIMVIGDTIARTILSPREIPIGAVTALIGAPFFLYIYFKKRGVAA

SEQ ID NO: 10700 - protein, 454 aa, Enterococcus faecalis
MILKTKLFGKVYQFTSVKEVLAKANEEKSGDKLAGVAANSAEERVAAKVVLSELSLNDLFNNPVVDYDEDEVTRIIIDQVNMRIFESIKHWTVAELREFILSSETTDFDIKRISRGLTSEMIAAVCKLMSNMDLIVGAKKINIEKTANTTIGRPGTFSNRLQPNHPTDNVDGIMASVMEGLSYGAGDALIGLNPVDDSTESVKRILNKFEEFRSEWEIPTQTCVLAHVTTQMEAMRQGAPTGLVFQSIAGSEKGNTAFGLNAEILAEAQDLALHSGQAAGPNVMYFETGQGSELSSEANFGADQVTMEARCYGLAKKFDPYIVNTVVGFIGPEYLYDSKQVIRAGLEDHFMGKLTGISMGCDVCYTNHMKADQNDMENLAMLLATAGCTYIMGIPHGDDVMLNYQTTGFHETATIRETLGLRPIKEFEEWMEKMGLMENGKLTSRAGDASVFIK

SEQ ID NO: 10701 - protein, 694 aa, Enterococcus faecalis
MTILEKRQEVQELTLEEVMGDRFGRYSKYIIQERALPDIRDGLKPVQRRILFSMNKDGNTFDKGFRKSAKSVGNIMGNYHPHGDSSIYEAMVRLSQDWKLREVLIEMHGNNGSMDGDPPAAMRYTEARLSQLSGELLKDIDKNTVDFVWNFDDTEKEPTVLPAKYPNLLVNGSTGISAGYATEIPTHNLAEIIDGTVYLIDHPNASLEKLMEYIPGPDFPTGGILQGKAEIKKAYETGRGKVILRAKTKIEPLKGGKQQIVISEIPYEVNKATLVKKMDEIRLNKKVDGIAEVRDESDRTGLQIVVELKKDVNAEGILNYLFKNTELQINYNFNMVAIDNMTPQQVGLKRILESYITHRKSVIINRCQFELDKARKREHIVAGLIKALSILDKVIATIRGSKDKKDAKKNLVSDYAFTEEQAEAIVTLQLYRLTNTDITDLQEEAKTLEQQIAELLNILNNEKELFSVMKKELREVKKQYGNPRLTQIEEEIQEIKIETAVLVAQEDVVVTVTHEGYIKRSSIRSYTASKPEEIGMKEGDFLLYAGEVNTLDHLLLVTNKGNMIYRPVHELPDLRWKEIGEHISQTILNLAIDESIIAVYPYKELSPTKTFVFITKAGMIKQTKMADFEPWRTYKSRPTSCMKLKSDQDEITNVYLTNDQDLLDVFLVSNRGFGYAIHYMKYQSWVVKRLELNQ

SEQ ID NO: 10702 - protein, 139 aa, Enterococcus faecalis
MGSKAAGVKSMNLKEDDYVVNGLLVHSEGDTPIVIVTQRGGVKRMLAQELTQLGRAKRGLMVLRELKKNPHRVVFMSESTDLDLLVTTQKGTQEVIQSKNYPISERTSNGSFVIDEQKDGQVMEVHEMHSAVIEEEQTN

SEQ ID NO: 10703 - protein, 322 aa, Enterococcus faecalis
MKQMRGSWFMKAVVINQYGSKEVLEEAEVTLPELSEHQVLVKEYATSINPIDWKLREGYLKQMFDWSFPIILGWDVAGVITEVGSQVTDWQVGDKVFARPETTRFGTYAEVTIVDDHLLAKIPETISFEEAAAVPLAGLTAWQALFDHGHLKEGETVLIHAGAGGVGTYAIQLAKEAGAHVITTASAKNHALLKKIGADEVIDYHTTNFAEVLTDVDLVFDTMGGEVQKNSFDVLKPNTGRLVSIVGIEDKQLAAEKNVSAESIWLQPNGEQLQKIADLMAAGKVKSIIGEVFPFSRQGIYDAHALSETHHAVGKIVVQMAE

SEQ ID NO: 10704 - protein, 317 aa, Enterococcus faecalis
MNQNQGVCIMSKILVFGHQNPDTDAIGAAISFAYLQKELGKETEAVALGTPSEETQYALDYFNIEAPRVVTEAASETNQVMLVDHNEFQQSISDIAEVNILAVVDHHRIANFETADPLYYRAEPVGCTSTIIYKMFKENNVTIPAQIAGMMVSAIISDTLLFKSPTCTQEDIDAAHALGDIAEINLEGYGLDLLKAGTNLSDKSAEVLLDLDAKSFPMNGKTVRVAQVNTVDLAEVLDRQAELEAAMAAENAANNYDLFVLIITNILDSDSELLAIGAEQAKIEAAFNVTLVNNRAFLPGVVSRKKQVVPQLTEVFN

SEQ ID NO: 10705 - protein, 200 aa, Enterococcus faecalis
MHSIFKKGHPEAPVFVLLHGTGGDETSLLPIAQELNKQATVLSIRGDVSENGMNRYFKRLAEGHYDLEDLEKRGEALHKFIQQAANEHQFSLDKIIFIGYSNGANIAIQLLLTHPDSYHQAVLYHPMFPVELTNQPDLTDTSVLLSLGEHDPIVPLPESMRVIQLFQNHGATVQEVWTQSHQLTYQEIKETQTWLAHLSS

SEQ ID NO: 10706 - protein, 147 aa, Enterococcus faecalis
MDNVLVKNALAELKEANIRITPQRYAILEYLIENHTHPTADEIYRALEDHFPNMSVATVYNNLRLFTEIGFVQEMSYGDASSRFDFSSKKHYHVICQKCGKIVDFHYPGLEDVEMAASKLTGFEINEHRLELYGLCPDCQQAQQENV

SEQ ID NO: 10707 - protein, 310 aa, Enterococcus faecalis
MTKGYVKSVTELIGQSPVVKLKRMVPEGAADVFVKLEFFNPGGSVKDRIALSMIQQAEADGRLKPGQTIIEPTSGNTGIGLAMVGAALGYPVKIVMPDTMSIERRKLMQAYGADLLLTPGAEGMKGAIAKATALAEEHGYFMPLQFNNPANPMIHEQKTGKEIVDVFGKRGLDAFVSGVGTGGTVTGVGHELKRIFPDIEIVAVEPTESPVLEGGEPGPHKIQGIGAGFVPEVLDTTVYQKVAAVSSEDALETARLMGPKEGILVGISAGAAIKAAIDLAVELGAGKRVLALVPDNGERYLSTALYEFPE

SEQ ID NO: 10708 - protein, 142 aa, Enterococcus faecalis
MSQQQEALKAYIGLLRTSHQLEQLAKQDVTCYDLNITEFSVLELLLHKGPQTIQKIKEKILIASSSTTYVIDQLHKKGYVTRTPSEKDRRITYVELTEAGKTLIEEIFPMHAKRIAEAFEQLSSEELTLLQKTLRKITNETK

SEQ ID NO: 10709 - protein, 667 aa, Enterococcus faecalis
MIFLFDKTDQLGVNTIRTLSIEAVQKANSGHPGLPMGAAPMAYALWTKHLKVNPTTSRNWVDRDRFVLSAGHGSAMLYSLLHLSGYNVTIDDLKNFRQWDSKTPGHPEVHHTDGVEATTGPLGQGIAMAVGMAMAEAHLAATYNRDSFPIMDHYTYAICGDGDLMEGVSQEASSMAGHMKLGKLIVLYDSNDISLDGPTSKAFTENVGARYEAYGWQHILVKDGNDLDEIEAAIEAAKAETDKPTLIEVKTVIGYGAPKEGTSSVHGAPIGEEGITAAKAVYGWEYPDFTVPEEVAARFKETMIDEGQKAEEAWNEMFKNYEHAHPELAKQFKEAFANQLPEGWEQELPKYELGTSAASRVTSKETIQAISKVVPSFWGGSADLSASNNTMVAAEKDFESGQYEGRNIWFGVREFAMAAAMNGIQLHGGSHVYGGTFFVFTDYLRPAIRLAALQKVPVTYVLTHDSVAVGEDGPTHEPIEQLASVRCIPNVHVIRPADGNETVAAWKIAMTSTETPTILVLSRQNLPVLEGTLEHASDSVQKGAYVLSPQKGEQPSGILIATGSEVNLAVEAQAKLAEEGIDVSVVSMPSFDLFEKQSAEYKESVLPKAVTKRVAIEAAASFGWERYVGTEGKTITIDHFGASAPGGLVLEKFGFTPENVVNTYKSL

SEQ ID NO: 10710 - protein, 164 aa, Enterococcus faecalis
MLAAIWAQDEQGVIGKEGKLPWHLPNDLKFFKEKTIHNTLVLGRATFEGMGCRPLPNRTTIVLTSNPDYQAEGVLVMHSVEEILAYADNYEGVTVIGGGSVVFKELIPACDVLYRTMIHETFEGDTFFPEIDWSVWEKVATVPGVVDEKNLYAHDYETYHRNDK

SEQ ID NO: 10711 - protein, 631 aa, Enterococcus faecalis
MSVKELKVTDLTKTYGEKTLFDHLSFLIHEKDRIGLIGINGTGKTSLLNIIAGVDSGDGDLAAIQQPSDYQIGYLSQNQTFDENITIAEAVFQGDSPIIKTVKNYELALAALSENGLDEGVQRRYTQAEEAMNKQDAWTADTNAKIILQKLGIPTLEKKIGELSGGQLKRVSLAQVLIEAPDLLLLDEPTNHLDYETIEWLENFLNNYRGAVLMVTHDRYFLDRVTNRIFELSFGKLYEYKGNYETYVMEKAERERVAVEQEEKRKRLFKQELAWMRAGVQARGTKQQARIDRFQDLKENLHQVQTNGTLEADFATQRLGKKVLEIKEGNYAIDHKQLLKDFNLLIQANDRIGITGKNGAGKSTLLNILAGRIPLESGLYSIGETVRIGYYTQQNEEMDPNQRMIAYLQEAAEEVKRSDGSSVGVAEMLERFLFPRFMHGTLIGKLSGGEKRRLYLLKLLISQPNVLLLDEPTNDLDIDTLTILEDYIQTFKGAVIAVSHDRYFLDKTMDKLLVFQGNAQILSFYGTMSEYLANQKEQEKVKEKPLNKPVKEASTEKKEKTKLTYMEQKEWATIEEDITQLETKLETLTEEMNHQGDDFVRLQELQEAVTATEQLLEEKMNRWEYLSEYAD

SEQ ID NO: 10712 - protein, 684 aa, Enterococcus faecalis
MEFTFLIIVFALSITFSNIFNRIVPVIPLPIVQIIVGVLIGLTKMGQEIEFEPEVFLVMIIAPLLFREGELINLKAMMKNFGMILFLAFFGVLITLVGVGWTLHMILPTLPLAACFAFGAALGPTDAVAVGSLSGRIDIPERSMNILSGEGLINDASGVTAFQFALAALLTGSFSPVEAAGTLVISSIGGAVVGIVLVLLKQQIVHLLETAVAKDVTGYLLIELLLPFIAYLISELIGVSGIIAAVIAGIMQASSLKKVSLFEAELSNVGESIWSMIEFTLNALVFLFLGIELSQVFSPIWIDQQYSNWFLLMVVLIISGVVFLIRFLAIFSVYTLQHGFKKVKTAMNEMLILTFGGVKGTVSLATIFILPTAINGEHFKERPLLLFITACVILVTLIGGILVLPFLTDSETEVENEESVEIDLLRDVIDVLKQQNEENPRGEMNAVIENYQDRLKELYTEQLSAERKQEVQELRTLIVSIERDGLEESLKQGEISVRSYRMYQRLITRMQRSIAKQLLSIVGFWLLFARQIISILLHPKLFFNRGEASEEEKELRNEELENIRQVFLRNSQVILKSLDNLRGVYDDDLIDFFIDGRLDLAHKFEKGEFIDSYIVHTETDYVKDLLLGFQEERRMIDHYEQSERISIIEANELRKNVNLLESYSISGEVNNVPLKRFVKNFNKE

SEQ ID NO: 10713 - protein, 285 aa, Enterococcus faecalis
MYNKQKLHSRGDFMNYIYLINEHYPLLTKSERKVADFILNSGESIIYSTMNDIKTKANVGDATIIRFCQKLGFSGFSDLKIEIAKEDFSKKKEKPSSGKYHDEVAKSLIEVLQSTSCLINEEKLTKAIQLINQASSLYIFGVGSSGNTSLDLESMFLRVGIQAKAVLDPHYQAQVASLLTDRDLVIIFSLSGKTKDTYDSLKIAKNNGAKILAITNYIHSPIGKSADLVLQTAIEEFLNGGSLAGKISQLYICDLLVHEYEQNNKINSLDLREKVLRSIIDKRIE

SEQ ID NO: 10714 - protein, 496 aa, Enterococcus faecalis
MSYVLGIDLGTSSLKGLLVSEIGDVIATSSSDYPLFSSRPGYSEQNPHDWIKAIENVINDLLSEFPEMKKELKGISISGQMHSLVLLDKDNEIIRPAILWNDVRTTKQCEDIMNCMGREVQEITKNIALEGFTLPKILWVQENEEKNWTKTRHIMLPKDYLVHWLTGCYSTDYSDAAGTLMLDVKKRIWSKTILDKFNIPKEYLPTLFESSAKVGNMRSSLINKFGLETKVEIFAGGADNACAAIGAGIVNSEVAMLSIGTSGVFLSMEDDAENEYQDNLHLFNSALPNSYYSMGVTLAAGNSLKWFRDTFAKDAEFSDLLANIDEVIVGSEGLIFTPYIRGERTPYQDSQIRGSFIGIDSRHSLKHFTRSVIEGITFSLKESKVIMEQRKNLKIKKIISVGGGTKNQQWLQIQADIFGLPITTLETEQGPSLGAAILAVIGCGMCANIDSCIKMFVKYKKVYQPIEKNVLLYNKFFQVYSKVYSTTKEICYQLQE

SEQ ID NO: 10715 - protein, 152 aa, Enterococcus faecalis
MINNVTLVGRLTKDPDLRYTQSGTAVGQFTLAVNRNFTNQQGDREADFINCVIWRKAAESFANYARKGTLIGLTGRIQTRNYDNQQGQRVYVTEIVVENFQFLESKEVNDQRRSSKPDQATFDKKATEKPDPLDPFSKDVSPIDISDDDLPF

SEQ ID NO: 10716 - protein, 182 aa, Enterococcus faecalis
MSLKSKELIKTVVFFACLALGLFLLRQFVFTPVVVRGHSMDPTLADGERVITLKNTEINRFDIITFPAPDEPDKNYIKRVIGLPGDTIAYKDDTLYINGKEVDEPYLDEFKKALTDGQPLTGDFSLKEKVPADSYFVLGDNRRNSKDGRVIGFIHKKDILGEVKFVMWPFSRFGPIPEVSKQ

SEQ ID NO: 10717 - protein, 1271 aa, Enterococcus faecalis
MRKEQPKMSKTIPLRPANEQFTDSQWQAVFDGDENILVSASAGSGKTTVLVRRVIEKVKSGVDIDRLLIVTYTEAAAREMKERIQVALQKAMNEEQDPERRRHFSRQIALLPTANISTLHAFCLTVIRRFYYLIDIDPVFRMLTDETETLLLKEDVWDALREQFYAENQEAFYQLTANFSNDRSDDGLTNLIFSFYEFAKANPDPEAWINGLTQAYEVGDQLGESTLFQTYLKPLAVETLQRTLQRYEEMVTLTEGEEKLQKIWYLAQNEKEQTKQFLQFLERNDLESAYNLTELLSFDRYPTVRAEELKPTAEQAKQLREQNKKALNDLKKQLFTLSPDAMKQVLKEATPIVQEMAHVGKQFMEAYGAEKRLKNLVDFNDLEHYTLAILAKNQADGWHASEASVYYREKFDEVLVDEYQDINQLQESILYWLRRPLSTEGNLFMVGDVKQSIYSFRLADPTLFIEKYNQYGQGKEGKRIILAENFRSRKDVLDFTNLVFSQLMDERVGQIAYDESAALVHGFDQFSEAADYSTELLIYEKKATESVEFPELQSPELLIEDKTEGELYVTALKIRELIDQNFLIYDKKLKTDRPITYQDIVLLTPTKKNNLTILDVFKSLEIPVQVNDAQNYFQATEIRTMIALLQLIDNPYQDIPLAAVLRSPIVGLKENELVLIRLANKETSYYEAFLTFNQKMEPTMEEAVVQEKTIRFAESLEKWREQARRNQISTLLWTIYRETAYLDYVGGLPVGKQRQANLYALVDRAAAYEKTTFRGLFQFVRFIEKMQEKDKDLAEPVVLSEENAVRVMTIHASKGLEFPVVFVLDMTKEFNVSDLNERYIFEENLGVGIRYLQPEERVMYDTLPFLAIKQVRLRKLLSEEMRKLYVALTRAEQKLFLVGSYKDQAAMWKEWLKVGDVETLVLPAENRLQSKSSLMNWVGMTLVRHQKADEYQQEVVVSNVPQVKKHPANFHIQWFNEEQLRAAIQQLQLPERQAEDLAEKAQLSADKINRGLARLSFNYPFEVATRTTSYQSVSEIKRVFDDPDNKEIGKIEVREDNTIQAQPLIVNRMIEGDLSKPKFLDTVQAPSAAEIGTATHYLLQLIDLSKQPSYEEVRAVQERLVENKLILPAIAEKMNLEQIVAFFDTALGKQLIQHHQTVRREQPFSMLIEAEELIQNYPETTQDDLLIHGIIDGYIELDNQCILYDYKTDHVKSTSPQAISEIVERYRGQMNLYRRALQEATHKEVSHVYLILLNGGVIIDMQTGNVVDFIK

SEQ ID NO: 10718 - protein, 348 aa, Enterococcus faecalis
MTLQAQLEALRDNTLKEIAQVATLKELNQIRVETLGKKGPITEVLRGMKNLSPEERPVVGGFANEIRDLLTEAIEARKVVLENEALNAALKEESLDVTLPGKQMPQGTRHILTQVMEEIEDIFLGMGYQVVEGYEVESDHYNFERMNLPKDHPARDMQDTFYISDEMLIRTHTSPVQARTMEKHDFSKGALRMISPGKVFRRDTDDATHSHQFHQIEGLVVDKNVTMGDLKGTLEVMMKKMFGEDRKIRLRPSYFPFTEPSVEVDVSCFKCGGAGCNVCKHTGWIEILGAGMVHPDVLQMSGIDPTEYSGFAFGLGPDRVAMLRYGVNDIRNFYQNDLRFLNQFKVKE

SEQ ID NO: 10719 - protein, 807 aa, Enterococcus faecalis; identical to SEQ ID NO: 4915

SEQ ID NO: 10720 - protein, 275 aa, Enterococcus faecalis
MRMSNQEAIGLIDSGVGGLTVLKEALKQLPNERLIYLGDTARCPYGPRPAEQVVQFTWEMADFLLKKRIKMLVIACNTATAVALEEIKAALPIPVVGVILPGARAAVKVTKNNKIGVIGTLGTIKSASYEIAIKSKAPAIEVTSLACPKFVPIVESNQYRSSVAKKIVAETLQALQLKGLDTLILGCTHYPLLRPVIQNVMGSHVTLIDSGAETVGEVSMLLDYFDIAHTPEAPTQPHEFYTTGSAKMFEEIASSWLGIENLKAQQIHLGGNEND

SEQ ID NO: 10721 - protein, 451 aa, Enterococcus faecalis
MIRHDSRAPKELRKITIETNVFKHPEGSVVISFGDTKVICSATVEEKVPPFLRGAGTGWVAAEYSMLPRATNTRNIRESAKGKLTGRTMEIQRLIGRSLRAVVDLEKLGERSIVVDCDVIQADGGTRTASITGAFVALRLAVNHLLMTGALAEDPIKEHLAAVSVGILPDGYCVLDLDYAEDSNAAVDMNIVMTESGEFVEIQGTGEEATFSGDELNAMLFYGKTGIEELIAYQKEALYALASEEVPSQDSEEKVIVIATRNPGKAKEFSSIFGEKGYTVKTLLDYPNLPDVEETGRTFEENARLKAETIAEILQKPVLADDSGLIVDALGGMPGIYSARFAGEPTNDASNNAKLLHELTGVPKEKRQARFHCTLVFAEPKKESLVVEAEWPGEVGTIPRGEGGFGYDSLFYVPELGKTAAELSGEEKNKVSHRGQAVAKLKEQWEEWLKK

SEQ ID NO: 10722 - protein, 126 aa, Enterococcus faecalis
MIMMGAILNIGAVVGAGTMIDMGAVLGGRATVGKHCHIGAGTVLAGVIEPPSAAPVVIENEVVIGANAVVLEGVRVGEGAVVAAGAVVVEDVPAHTVVAGVPAKVIKQIDDKTKSKTEILEELRKL

SEQ ID NO: 10723 - protein, 306 aa, Enterococcus faecalis
MLILGLASTETVDSSAPDLAEATVKKVSALQRFWNNINWDAIVATLIEKSLSILFLIFLFFIIQRIGKYLIDRTYANYSKKQHFSESRLKTLHTLIINAFQYTLFFFFIYSLLTIVGVPVGSLLAGAGIAGVAIGLGAQGFMNDLITGFFIILEQQMDVGDYIRLLALNIEGTVTSVGLRTTQIKAVDGTVHFIPNRNITTISNLSRANMQVLIDVRINPEEGYEKICEVITEVNETLKEKYIESIQTGPDIFGMVDLGNGNFAVRTTMYVLNGKQFAVKEEFLAQYIKALTEAGFTIPNTPIIAK

SEQ ID NO: 10724 - protein, 290 aa, Enterococcus faecalis
MRSILKVMKMKGLKKHMTLDKTKKLANGNEMPRLGLGVWRVEDGSEATNSVKWALKAGYRLIDTAAVYKNEVGVGEGIRQSGIPREEIFVTTKLWNEDQGYENAIKAFDKSLEKLGLDYVDLYLIHWPVAGKYKESWKALEEIYASGRAKAIGVSNFHQHHLEDLLTEANVVPMVDQIELHPTLTQEPLRKYLAENKIAVEAWSPLGQGNLLSEPVLVKIGEKYGKSAAQVIIRWHLQNDIIVIPKSVHEKRIQENFAVFDFELTPEEITAINQLNKDHRFGADPDNFDF

SEQ ID NO: 10725 - protein, 270 aa, Enterococcus faecalis
MSIKLVAIDIDGTLLNSQHMITPRVKEALQKANEQGVRIGLCTGRSLPGVKEQLDELALYGENDFVITYNGSLVQATKDNAIISRYTLSYEDFLEIEMYSRKVGAHLHTIDDSAIYTANRNIGKYTIHEASLVNMPLKYRTVDEMTPEMNIIKMMMIDEPEVLDPAIAKLPLHFTEKYTTVKSTPFYYEIMNKNASKGNALAKLADHLGLNKDEVMAIGDNENDLSMIDYAGIGVAMGNATENVKTIADVHTTSNDEDGVAQIIEKMVVI

SEQ ID NO: 10726 - protein, 283 aa, Enterococcus faecalis
MSTTFPLHTESFMLLDSGCLTNSDYFLPFALTDVLTTFSGMQHQPIIHFWQLDQAMILGMKDTRVPHLKEGITSLQENDYSVVVRNAGGLGVIADSGILNVSLILPNNSEHKLSIDAAYELMWAWLRQSFPEKEIDAFEITTSYCPGTYDLSIGGQKFAGIAQRRVKDGIAVMIYISVNGNQLARGEVVRDFYLAGLQEQFGENGYPPVDPAVMANLETLIETPLTIDAVKTRLIEALPQQFEKSIDPNLTEPIITSEWFQTNLTVQLEKMAQRNALIKGEIV

SEQ ID NO: 10727 - protein, 536 aa, Enterococcus faecalis; identical to SEQ ID NO: 4984

SEQ ID NO: 10728 - protein, 778 aa, Enterococcus faecalis
MPTANSGSRAARHASNTSSKSSYKKKTQPPKKKKRLVLKIFLGLLIAGMVAFLAGVGLFWFYARQAPKLEDDKLNATVSSKLYDINNEIFEDLGAEKRELIQPNDVPQLLKDAIVSVEDRRFYKHIGVDPIRIIGSALSNVKNGGLQGGSTLTQQLIKLSYFSTKESDQTLKRKAQEAWMAVRLEREKSKEEILTYYINKVYMANGFYGMETAAENYYGKHLSELDLPQTALLAGMPQAPNSYDPYTKPDTAKERRDVVLYTMYDNKKISKAEYEKAKATPIDEGLVPLKASDDNRKVVDNYVKEVINEVKAKTGKNVYTDGLDIYTNLDMNAQKQLYDIVNSDQYVAFPDDKMQVASTVIDVASGQVRAQIGGRHIPDDVQLGNNLAVNTQRDVGSTVKPIMDYGPAIENLNYSTGRLMVDKPTKYPGTDIDVFNSDLTYQGVITMRRAIMGSRNTTAVQTFDEVGKENIMPFIKGLGIDYKNLEASNAISSNTSDVDGDKYGISSLKLAAAYAAFANNGIYNKPYYVNKVVFNDGTSVDYQPDGKRAMKDSTAYMMTDMLKDVLNGGTGFNGAIPGLIQAAKTGTSNYTDEDLARMGTTEKGIAPDSTFVGYTTHYAVSVWTGYNDRNTPIYQEYYGIASDVYREIMSYLSQNVSNDDWVQPDSVVRVGNELYVKDAYEVPNVQVLPSTTSSAPQPESSSTVESSSTKEAESSSSSSSESAPSSSEAPPSTEQPASSSSAEQPATSEQPPEPSSSSSQEPPQPPESSSKPDENKAA

SEQ ID NO: 10729 - protein, 136 aa, Enterococcus faecalis
MANLVYSPKDILQKEFKTKMMNGYDPIEVDEFLDNVIKDYEAYNKELLSLQEENSRLMAKLDQLSKAQPTPRVAQEVPKSAAVTNFDILKRLSNLEREVFGKKLDETPSTPVTPSAPSMTAEPANHDVDNAQTRQF

SEQ ID NO: 10730 - protein, 254 aa, Enterococcus faecalis
MTENAPKFKQISAEIEKKIRDGLYVSAQKLPSEYDLAKEYNCSRLTIRKAIDDLIRKNILVKRHGKGSYVMSQAKIQSGRAGLQGFTEAAKAYGKKSQTEVISFEEVVHPAEKIREALQVGKNEAIYELIRRRMLDGEPMTVEKIYLPQAYVQGHTKQDFEGSLFCLIEKNVEIAYSHQEIEAILVEAEISELLNVPVGQPLLQVHSITYALDATPILYDVSLYRADRYTFKNTLTRYSPSENNQVELGGSWNE

SEQ ID NO: 10731 - protein, 454 aa, Enterococcus faecalis
MTTVQKFLDWLERVLTPLAKVIGENKYLVAIRDGFLLSTPLLIVGSVFLLIANFPLPQWDTWMSHLLGKDWATMMSVPASASFDVMTILAVVGIAYSLGKQFNVDAMQAGIIALVSFFIVTPYQTLFTPENSSKVYEVTSLPLKWMGSSGLFLGMIVALIATRLFVAIVRKGWTIKMPEGVPPTVVKSFEALIPSFLVVTLMFLVNWLAALTPYGNLQDVIFEFLQTPLLSLGNTLGAMSIAYLFLHFFWFFGINGGSVVGAVFNPVLRALSVENLQAFKDGHEIPNIITGQFQDMFATFGGAGSTLSLIIVMVLFCKSQRIKKLSQLSLIPGVFGINEPIIFGLPIVLNPILLIPFVLVPAINIIIAYFAMDWGLVPLTNGIQLPWTTPPIISGFLVSGWQGSILQALLLVLGMFIYYPFIRVMDDQYLREEWKAQEEESEEIDFDSFDFDDL

SEQ ID NO: 10732 - protein, 1049 aa, Enterococcus faecalis
MKISHREEAEVEEQLIRVLGEGHNQWTYRPDLKSEEDLWVNLRQKIISNNQAELNDSPLTDKEFETIKTELLLRTKTPFDAAKWLKGENGMARITIEREDSQLGSVSLILYSNQDIGGGISTYEVVHQIAKRGSNIEARDRRFDVTLLINGLPIVQIELKQVTAKDGVYQAFNQIKKYAEEGMFRNNIFSTLQLFVVSNEQTTRYFANALPKDLHPKFLFSWRTKDNEKVENLYEFCKQVLNIPDAHRLIADYTIVSEDQDNKTLMVLHPYQVHAIQALFIAANKHQSGYVWHATGSGKTLTSFVSTKLLARKSGIDRTIMLVDRKDLDNQTTTEFTKFASEFNTGISSGNAKANSLIVGTGSAKELSETLLADANANVVIITTRQKLDAALKYAKKQEEKKGTNRFQKLMGQHIVFVVDECHRALSAENMEEIKKMFPKSTWFGFTGTLIFPENRKQAKGQLARTTHDQYGEVLHTYTIKNALEDGSVLGFQVEHENTVEPTSLENKIYRKLKEVETYAEYSSEQINRMIDQMESIKKESYLDPAVFEVDEHIQKVIHKMFRPDNAYTKFDFRNGRPTKSAILTTSSIDMAKKYYRAIKEMTKEPEWLTKEFPNQPIREGRTMEDPDFPRIAITYSLEENSRDSSVQQEEMQKIIEEYNQYYDTSWSLADIERYNGDINNRLARKRAEFKQFGKQIDLVIVVDRLLTGFDAPTIQTLFVDRNLEYAGLIQAFSRTNRTYPDKTKGLIVTFRKPATMEKNVEDATKLYSEAKEESGLICPSYQESKKRFKQAYGKLKEVSSMESIDEHTPLEIRIEYVKAFQELNRAYESLVTYDDYNDDIVQSSTLNNQIQLLEEQIGVYETVKGSLIEEEPEKEGEDFSTIEFYSENTTKLYDIDSTYIDQLLGTYAANSSDARDEIEKALAKLNKTEGVKEVYRQILNAFDVGTLDSNEDIFVIKRRYFTQASDDLIHVFSNEWFVSEKELHASNLQYMPGEDPIPNMKAIINSKDYEGYKANHPEAKPFKYPQEMKRAWRKMLDDELIPLENELR

SEQ ID NO: 10733 - protein, 572 aa, Enterococcus faecalis
MKQSKMLIPTLREVPNDAEVLSHQILLRAGYIRQVAAGIYSYLPLANRVLEKLKTIMREEFEKIDAVEMLMPALLPAELWKESGRYETYGPNLYRLKDRNDRDYILGPTHEETFTELIRDEINSYKRLPLNLYQIQTKYRDEKRPRSGLLRGREFIMKDGYSFHADEASLDQSYRDYEKAYSRIFERCGLEFRAIIGDGGAMGGKDSKEFMAISEIGEDTICYSTESDYAANLEMATSLYTPKKSHETQLDLEKIATPEVGTIAEVANFFEVEPQRIIKSVLFIADEEPVMVLVRGDHDVNDVKLKNFLGADFLDEATEEDARRVLGAGFGSIGPVNVSEDVKIYADLAVQDLANAIVGANEDGYHLTNVNPDRDFQPISYEDLRFVQEGDPSPDGNGVLAFTKGIEIGHIFKLGTRYSDAMGATVLDENGREKSVIMGCYGIGVSRLLSAIVEQNADERGINWPTGIAPFDLHVVQMNVKDEYQTKLSQEVEAMMTEAGYEVLVDDRNERAGVKFADADLIGCPIRITVGKKAVDGVVEVKIKRTGEMLEVRKEELESTLSILMNTTSEVE

SEQ ID NO: 10734 - protein, 1451 aa, Enterococcus faecalis
MTEKARDLFDKLMTQIQLDDTAKEHPLIQNGRIDKVIVHQQSRLWEFHLSFDELMPVMLYQTFMQQLELAFQQIAQVSVQITTNQTTFTEEQLTDYWQLALLNSQCNTPLVQKVLKTQTPQFEDRKIILPVDNEAVIPYLKQQYLPIIEELYFSYGFPKFHIEPKMDQQQAAEVLKKFEEQKLEQAAAFQQQAAESLVKHEQMKKEKQQQAPAFDGPIRLGRNIPNDEPIMPMGNILEEERRITIEGFIFDKEVRELRSKRKILILKITDYTSSFVVKKFSNGEKDEQVFDAIQPQSWIRVRGSVQEDTFMRDLVMNAQDLMEVAHAPRKDYAPEGEKRVELHMHSNMSTMDATNKVGDLVAQAGKWGHKAIAITDHGGAQAFPDAHAAGKKAGVKILYGVEANIVDDGVPIAYNEEHIELTDATYVVFDVETTGLSAVYDTIIELAAVKMHKGNVIETFEQFIDPGHPLSQTTINLTGITDEMVRGSKSEEEVLRMFKEFSEGTILVAHNASFDMGFLNTSYGKHGIPEAANPVIDTLELSRFLYPHFKSHRLNTLSKKFGVNLEQHHRAIYDSESTGHLCWIFLKEAKENHDMHFHDDLNRHIGEGDSYKRARPFHATILATTQAGLKNLFKLISMSNVDYFFRVPRIPRSQLSKLREGLLIGSACSNGEIFEAMMQKGVEEAKNRAKFYDYIEVMPKPVYAPLIEQELVKNEADLEEIISNLVKIGDELGKLVVATGNVHYLNEEDAIYRKILVGSMGGANPLNRHSLPKVHFRTTDEMLTEFQFLGQDVAKRIVVENPNKVADLCEEVIPVKDDLYTPKIPGSEQEITDLSYNRARELYGDPLPEIVEKRLEKELNSINGNGFSVIYLISQKLVHKSNEDGYLVGSRGSVGSSFVATMTGITEVNPLAPHYYCPECQYSEFYEDGSYGSGFDMPEKACPKCGARLFKDGHDIPFETFLGFHGDKVPDIDLNFSGDYQAEAHNYTKVLFGEEYVYRAGTIGTVADKTAYGFVKGYERDHNLHLRGAEIDRLAKGSTGVKRTTGQHPGGIIVIPDYMDVYDFTPIQYPADDQEAEWKTTHFDFHSIHDNILKLDILGHDDPTVIRMLQDLSGIEPKTIPTDDPEVMRIFEGPDVLGVDAEQIYSKTGTLGIPEFGTRFVRGMLEQTHPSTFAELLQISGLSHGTDVWLGNAEELIRRGEANLAEVIGCRDDIMVYLIHAGLDSGMAFKIMETVRKGQWNKIPDELRDTYLNAMKENNVPDWYIDSCSKIKYMFPKAHAAAYVLMALRVAYFKVYFPILYYCAFFSVRADDFDLVAMSQGKEAVKARMKEITDKGMDASTKEKNLLTVLELCNEMLERGYKFGMIDLYKSDAENFVIEGDTLIAPFRAVPSLGLNVAKAIVAAREEQPFLSKEDLATRGKVSKTLIEYMNENGVLKDLPDENQLSLFDML

SEQ ID NO: 10735 - protein, 431 aa, Enterococcus faecalis
MIDRYTRPEMGAIWTDENRYKAWLEVEILADEAWAELGEIPKEDVQKIRENASFDVARILEIEAETRHDVVAFTRAVSETLGEERKWVHYGLTSTDVVDTAYGYLLKQANDILRKDLQTFTEIVGAKAKEYKHTVMMGRTHGVHAEPTTFGLKLALWYSEMKRNIERFEHAAKGVEAGKISGAVGTFANISPFVEEYVCEHLGIRAQEISTQVLPRDLHAEYVSAMALIATSIEKFATEIRGLQKSETREVEEFFAKGQKGSSAMPHKRNPIGSENMTGLARVIRGHVITAFENVSLWHERDISHSSAERIIIPDTTILLNYMLNRFGNIVKNLTVFPENMKRNMDATYGLIYSQRVLLKLIDHGMTREEAYDLVQPKTAYAWDHQTAFRPLLDADEKITSVLSKEELDDAFDYHYHLKNVDTIFERVGLG

SEQ ID NO: 10736 - protein, 340 aa, Enterococcus faecalis
MVQESVTENEIAQVVGRLTGIPVTKLVEGEREKLMKLNETLHKRVIGQDEAVDAVSDAVIRSRAGLQDPNRPLGSFLFLGPTGVGKTELAKALAEDLFDSEDHMVRIDMSEYMEKHAVSRLVGAPPGYIGYEEGGQLTEAVRRNPYTIVLLDEIEKAHPDVFNILLQVLDDGRLTDSKGRVVDFKNTVLIMTSNIGSQLLLEGVTPEGTIPEEVENQVMNILKGHFKPEFLNRIDDTILFTPLSLDNVKGIIGKMTAQLAHRLEQQEIVLEITDEAKTWIAENGYEPAYGARPLKRFITREVETPLAKEIVSGRVMPKTKVTISLLDNQLVFENEPIEEV

SEQ ID NO: 10737 - protein, 511 aa, Enterococcus faecalis
MDASEYKNYLLGLIFYKYLSDRLLEQVVLLADESLEEYDTVSKQTMLYRELLSDEESKEDLIATIVDILGYAISPEYLFNVLADQAKQATFQLNDLNKAFVQLASTYNQFNGLFDDVDLQSKKLGTDEQQRNVTITEVIKKLNDVEVLGHDGDVIGDAYEFLISQFASEAGKKAGEFYTPHMVSDMMAQIVTLDQKERRFFSVFDPTMGSGSLMLNVRNYLTHPDNVKYHGQELNTTTYNLAKMNLILHGVDAEEMNLRNGDTLNKDWPTDEPYTFDAVVMNPPYSANWSADTTFLDDSRFNRYGKLAPKSKADFAFLLHGFYHLKETGTMAIVLPHGVLFRGAAEGVIRQKLLEDGSIYAVIGMPANLFFGTSIPTTVIVLKKNRQNRDVLFIDASREFVKGKNQNKLSEENIQKILENYAERKDVEKYAHLATFDEIKENDYNLNIPRYVDTFEEEEPIDMVHVGNDIKKIRQEQQVLEKELLEAISSLQTTPENEAWLQGALEVFKHE

SEQ ID NO: 10738 - protein, 170 aa, Enterococcus faecalis
MGEVMQGKDRILLVRRLDEAATKKAMKPLFQIEHEWEFSRESSGTQTKDGVANAVSGLEVTLSLSGLASRDDENLYMKDAVEDGILMEFWDVDLKGEKNAEGKYPAIYAQGYVNSWSLPANVEELVEIETEASINGKPQDGFATVEADIIAEAQYAFQDTVPDKAPQPGA

SEQ ID NO: 10739 - protein, 355 aa, Enterococcus faecalis
MGKEYHVAVVGATGAVGTRMIELLAETSLPIASVRLLASKRSAGQEIQFKGQPLIVEELVPESFEGIDLALFSAGGSISEKFAPEAVKRGAVVVDNTSHFRMAKDVPLVVPEVNPEALKNHQGIIANPNCSTIQMMVALEPIRQAFGLERIIVSTYQAVSGAGIRAINELKEQAEDFLEGKPVSEWSAEILPAGSDEKHYPIAFNALPQIDVFSEAGYTYEEWKMMNETKKIMGDNKLKVVATCVRIPVISGHSESVYIEVKQADASVSAIQELMAQAPGVILQDEPSEQLYPQALNSVNQKETFVGRIRQDVDVKNGFHLWIVSDNLLKGAAWNSVQIAETLHEMNLLRVPEND

SEQ ID NO: 10740 - protein, 609 aa, Enterococcus faecalis
  VARIANT (1)...(609): Xaa = Any Amino Acid
MSKIIGIDLGTTNSAVAVLEGGERXIIANPEGNRTTPSVVSFKNGEIQVGEVAKRQAVTNPNTISSIKRHMGEAGYKVDVEGKSYTPQEVSAMILQYLKGFAEDYLGEKVEKAVITVPAYFNDAQRQATKDAGKIAGLEVERIVNEPTAAALAYGLDKTDKDEKILVFDLGGGTFDVSILELGDGVFDVLSTAGDNNLGGDDFDNKIIDYMVAEFKKENGIDLANDKMALQRLKDAAEKAKKDLSGVTSTQISLPFITAGEAGPLHLEMNLTRAKFDELTSDLVERTKVPVRQALKDAGLNPSEIDEVILVGGSTRIPAVVEAVRKETNKEPNKSVNPDEVVAMGAAIQGGVITGDVKDVVLLDVTPLSLGIETMGGVFTKLIDRNTTIPTSKSQVFSTAADNQPAVDIHVLQGERPMAADNKTLGRFQLTDIPAAPRGVPQIEVSFDIDKNGIVNVRAKDLGTQKEQTITIKSSSGLSDDEIERMVKDAEANAEADKQRKEEVDLRNDADALLFTVDKTLKELEGKVDAEEVKKAEDARDELKAAIEANDIEQMKAKRDSLNEIVQNLTVKLYEQAAQQQAQENPEAAQGGADDVVDADFEEVNGDDK

SEQ ID NO: 10741 - protein, 730 aa, Enterococcus faecalis
MAEAYNEEVVALLQKELTTYRSKQITTVLTLLNEGNTVPFIARYRKEMTGSLDEVQIREIEERYHYLQNLKKRKEEVLRLIEEQGKLTKELKTDIQKAVKMQQVEDLYRPYKQKRRTKATIAKEKGLEPLADWLLSLPENADILAKAATFINEEKEVATAEIALQGAHEILAERISDEPKYRTWLRDYMVKHAQYVSVVKDEEKDEKRTYEMYYDFAEPVSKMVPHRVLATNRGEKEDILKVSLVADETKINDYFQRQLIGKQATSFAAPYIEAAYLDSYKRFIGPAIEREIRNELTEKADEQAIAIFGENLRNLLLQSPLKGKVVLGFDPAYRTGCKLAVVDETGKVLAIQVIYPHKPATAAKREAAGPAFKKIIEDYQVDMVAIGNGTASRESELFVAEQLKAVKRDVFYVIVNEAGASVYSASEVARKEFPDLQVEERSAVSIARRLQDPLAELVKIDPKAVGVGQYQHDVSQKRLAEQLDFVVETAVNQVGVDVNTASAQLLQHISGLNKTTAQNLVTYRDENGVFTARNQVKKVPRLGPKAFEQAIGFLRIPNGKNVLDNTGIHPESYPVAQAILEKAEIASKELGTAEAIEKLKQLPVNQLATELEVGSETLTDIIASLIQPGRDMRDEMSAPLLRKDVLTMEDLKPGMEMQGTVRNVIDFGAFVDIGVKQDGLVHISKLSPKFVKHPTDVVAVGDVVTVWVEDVDLKKGRISLTMLPRADRKE

SEQ ID NO: 10742 - protein, 384 aa, Enterococcus faecalis
MKMKTFIFADKFFLKSDVKGPGYLEITDGIFGNYTKDEPQGDVKIIREEGKWIAPGLVDTHIHGYMNHDVMDNDAEGIKVMSEGLLSCGVTSFLPTTLTSSKERLTDVARTIGQVYQEVPGAKIQGIYFEGPFFTEEHKGAQNPSYFGDPDLDTFHEWQEASGGIIKKIALAPERNGVKEFVETVTDEGVVVALGHSNATLEEADVAVEAGASVFVHAYNGMRGLNHREPGMVGALLTLQHVFSELICDGHHVHPQAAEVLMEKAGHDHVALITDCMMAGGMPDGNYNLGEFPVVVAEGTARLDTGNLAGSILKLKEAIKNVVDWGIATPAQAIMMASLVPAISCKIDDQCGMIANGRDADFIVLEPTMELAATYLDGVERYRA

SEQ ID NO: 10743 - protein, 565 aa, Enterococcus faecalis
MKRVSTIKIVPLGGVRENGKNMYVAEVEDEIFVLDCGLQYPENELLGIDVVIPDFTYLEENSERIAGVFLTHGHADAIGALPYLLSKIQVPVFGTELTIELAKLSVNSHAETKKFKDFHVIDPHTEIDFGQATVSFFKTTHTIPDSIGVSIKTKEGNIVYTGDFKFDQSAIEMYQTDYGRLAEIGKEGVLALLSDSSNAENPAQVASEAQIADEVFDTIRYWEGRIIVACVASNLQRVQQVLNAADRSGRKVVLTGQDFERIIRTAMKLEKLQLPSEDLLVKPKEMKKYAPEQLLILETGRMGEPIKSLQKMANNTHGVVRIEEGDLVYITTTPTTAMETTVAKTEDIVYRAGATVKQISDNLRVSGHANPNDLQLMLNLMKPKYFIPVQGEYRQLAAHADLAHEIGMPYKDIFITGRGDILEYTKGRMSVAGSTTAENIMIDGIGVGDIGNIVLRDRRILSEDGIFVAVVTINRREKRIVSPAKITSRGFVYVKTSKDLMKESSNIVTEIVEKHLESDDFEWSKLKQEIRENLSRYLFEQTKRRPVILPVIMEATQRKRPKNNA

SEQ ID NO: 10744 - protein, 1165 aa, Enterococcus faecalis
MNPAMNELALMTKEYHARIYERMMTNEDFLTVRLGVGEISSSFTTNYQSTEDDSLSQEAEEQLVWPYKQLEKAPIVVPLMGQTLGLAGTPAVLRTAIQTLLFQVSVLHSYRDVEFVTLVPEEDYQKDWHSWRWLPHVKIRSLNLRGIVHDPQTRDMVLNSFYQMITKRRQQVREAGNEKVHFQPQYILSILEESWLSGHGLNEFLAEDMSQYGVTVIWGKDALNMLPETTTTLIEYQSSEAATLINQNNKYVNQNFVPNHLPTAYPLAYAIQRLANLQHVEVEKNAIPEAIDFLELYDVKEIKDLNVTDRWQKADTSKSLAVPLGVRGKDDIVYLNLHERAHGPHGLVAGTTGSGKSEIVQSYMLSLAVNFAPEDVGFLPIDFKGGGMANLFAKLPHLLGSITNLDGASSARALQSIRAELQKRQRKFGEYGVNHINGYTKLYKQGKEITDPEEKKNYPSEPLPHLFLISDEFAELKANEPDFMAELVSTARIGRSLGVHLILATQKPSGVVDDQIWSNSRFKLALKVADANDSNEIIKTPDAASITQPGRAYLQVGNNEIYELFQSAWSGANYDPFATKEEKVDERIWSINQLGQYELLTADLSEEEEVSIKTEEELTQLDAIVEEIAKHAEESQATLPEKPWLPPLATEIVSPLFKTQWQEQRELSVPFDFMDIPAKQEQVNFNFDLHELNHTALYGSPGFGKSTALQTLVMNLARKNTPEQVQFNLFDFGTNGLLPLKKLPHVADLVRLEEEEKLVKFLKRIRKEIQERKDAFTEYGVASLNQYEEKSGQKLPVIVTIVDGFDAVKESPLEDPIESVLNQLLREGASVGLYTIITVLRTNSFKMSMTSNIPTHIGLYLVEEDAIRDVVGREALIPQEFMGRAQVKLEQPQEIQIYLPTEGENDIARLNRLEQEIEKMNQKWGGERPLPIPMLPKTIAMANLYNHPHAQQMLENMEFPITFDKETTNIVGFKPTEHGYFVIGDDTPQQNESVEKVIIEDMKHFRGRAERIIFNHSDRFGGYADSFDTVIAGTEYGSFVNELLQEIEQRQMISEYEPMLIYIPEAQQFVEKSFISAENLNILLKKGSQVAMYFIFQTNQKLLENSFNDADKLLRANIPAGMVGTRLADQSFVKTKSDYNEPAVELDESHFFEGRTAMRVKLVSE

SEQ ID NO: 10745 - protein, 42 aa, Enterococcus faecalis
MDHFQFVPFFPTIELVGEVEFLFPDVLRTVVANYLHAHYPIK

SEQ ID NO: 10746 - protein, 541 aa, Enterococcus faecalis
MEKHWWQEVVVYQIYPRSFKDSNGDGIGDLPGIIEKLDYLETLGIGAIWLSPVYQSPNDDNGYDISDYEAIMTEFGTMADMDRLIEEAKKRKIEIIMDLVVNHTSDEHRWFIEAKKSKENPYRDYYVWADPASDGGAPNRLKSAFSGSAWTFDEASGQYYLHLFSKKQPDLNWENQQMRQSVYEMMNFWIDKGIGGFRLDVIDLVGKIPGEEITANGPHLHRYLQEMNAATFGGKELLTVGETWGATPEIAKMYSSPERHELSMIFQFEHMSLDQQPGKEKWDLQPMEVAKLKQVFAKWQTELGNDGWNSLFWNNHDLPRMISRWGNDQEYWLESSKLFAILLHMMKGTPYIYQGEEIGMTNTPITDIREARDIETINMYHEYLEKGYSKEEILLKINTKGRDNARRPMQWTAEKNAGFTTGTPWIDVNPNYQTINVAAALADKNSLFYTYQEMIRLRKEHPLIVWGNFELLETVDEVISFYRTYGEERWLVVTNFSDKVQPFSADVHVEQVMIENMPTDVTALADYSLAPWQAFVVKVSQ

SEQ ID NO: 10747 - protein, 289 aa, Enterococcus faecalis
MPVVSGAEFLKAARKGGYAVGGYNTNNLEWTQAILEAAEAKKAPVLIQTSMGAAKYMGGYKVAKDMITNLVDSMNITVPVAIHLDHGDYEAALECIEVGYTSIMFDGSHLPFEENLRLAKDVVEKAHAKGISVECEVGSIGGEEDGIIGTGELADIEECKQMVATGIDYLACGIGNIHGQYPENWKGLAFDHLQAIAEAVGSDVPLVLHGGSGIPQEQIEKAISMGISKVNVNTEFQLSFAKATREYIEAGKDLEGKGFDPRKLLAPGKAAIIKDAEEHIDWFGSANKA

SEQ ID NO: 10748 - protein, 234 aa, Enterococcus faecalis
MKKILVVDDEKPISEIVKYNLVKEGYEVFTAYDGEEALEKVEEVEPDLIILDLMLPKMDGLEVAREVRKTHDMPIIMVTAKDSEIDKVLGLELGADDYVTKPFSNRELVARVKANLRRGATNAKEAEVTTQSELTIGDLTIHPDAYMVSKRGEKIELTHREFELLYYLAKHIGQVMTREHLLQTVWGYDYFGDVRTVDVTVRRLREKIEDSPSHPTYLVTRRGVGYYLRNPEQE

SEQ ID NO: 10749 - protein, 609 aa, Enterococcus faecalis
MKKKVHFFQSVNFKIALSFILLLLIAIQIIGGYFIRELEATTISDFKKNMDSQVVQLSNTLSTQMSNKDLERSDVDANLKKALSDFSNADISEARIVDDKGIIRATNDLNQQNIIGKKNDYRDLNDFTSKKYQALDNDKRVYVNVQPIQSPTGETVIGVLYVKSNLENKYQEITNTASIFFTASIIAAAISIIVTLLIARSITKPIGEMREQAIRIARGDYAGKVEVHGKDELGQLAETFNQLSERIEEAQETMEAERNRLDSVLTHMTDGVIATDRRGKVITINEMALSLLNVKNENVIGTSLLELLDIEEDYTLRKLLEEPDELLIDRSTSDREEDQMIIRVDFTMIRRESGFITGLVCVLHDVTEQEKNERERREFVSNVSHELRTPLTSMRSYIEALSEGAWENPEIAPNFLKVTLEETDRMIRMINDLLNLSRMDSGNTHLQLEYVNFNELINFVLDRFDMMIENEQKNYKIRREFTKRDLWVELDTDKVIQVLDNILNNAIKYSPDGGVITCRLVETHNNVVFSISDQGLGIPKKDLGKVFERFYRVDKARARAQGGTGLGLAISKEVIRAHNGSIWVESTEGEGSTFYISLPYEPYEEDWWE

SEQ ID NO: 10750 - protein, 430 aa, Enterococcus faecalis
MKKIVINKNRPLKGEVTISGAKNSVVALIPAAILADSPVTLDGVPDIQDVHSLIEILEIMGAKITFENNTLIIDPTEVVSVPMPKGKINSLRASYYFMGSLLGRFGEGVVGLPGGCYLGPRPIDLHIKGFEALGAHVTNEHGAMYLRTDEAGLQGTRIFMDMVSIGATINVMLAAVKAKGKTIIENAAREPEIIDIATLLNNMGAKVRGAGTDVIRIEGVEELHGCRHSIIPDRIEAGTYLAMAAAMGEGIKVRNVIYEHLESFIAKLQEMGVKMTIEEDMIEVHPSHDLKMTTVKTYPYPGFATDLQQPLTPLLLKAQGTGEIIDTIYAQRNKHIPELVRMGADASVEGNMIILNGPNQLHGAEVVASDLRAGACLVTAGLMAEGTTTIYNVEYILRGYDHIIEKLTALGADIQMLETEEQEGPFEVDQ

SEQ ID NO: 10751 - protein, 94 aa, Enterococcus faecalis
MRCSKMGFTDETVRFDFDDNRKKAISETLETVYRALEEKGYNPINQIVGYLLSGDPAYIPRYQDARNLIRRHERDEIMEELTKYYLANHGIDIK

SEQ ID NO: 10752 - protein, 140 aa, Enterococcus faecalis
MRIMGLDVGSRTVGVAVSDLLGWTAQGIEIIRINEEEENFGFERLGELVKEYEVTKFVVGLPKNMNNSIGPRAEASMAYGDKIQELFQLPVDYQDERLTTVQAERFLVEQADASRAKRKKVIDKLAAVMILQNYLDAHSR

SEQ ID NO: 10753 - protein, 119 aa, Enterococcus faecalis
MHIADNYRALNTSRERRRMTEHNHDHDHEGHEHITLVDEQGNETLYEILLTVDGQEEFGKNYVLLYPAGIPEDEDVELQAYSYVENAEGTEGDLQQIETDAEWDMIEEVFNTFMAEEEE

SEQ ID NO: 10754 - protein, 347 aa, Enterococcus faecalis
MSDYLTMAELENSTLKDIYAYAKEFKIPYYSQMNKKELSLAVIRAQAEKQGFFFMEGILDIVSQDGYGFLRPINYGPSAEDIYISSSQIRRFGLRNGDKVAGKARPPKESERYYGLMHVESVNGKDPEEAKERPHFPALTPLYPEKQLTLETTAGRLSTRMIDVFAPIGFGQRGLIVAPPKAGKTSVLKEIANGITENHPDVELILLLIDERPEEVTDLERSVKGDVVSSTFDQQPQNHTRVAELVLDRAMRLVEDKRDVVILMDSITRLARAYNLVVPPSGRTLSGGIDPAAFFKPKRFFGAARNIEEGGSLTILATALVDTGSRMDDVIYEEFKGTGKYGAPFIS

SEQ ID NO: 10755 - protein, 311 aa, Enterococcus faecalis
MINYWRKNMSKGKKIFAIIFGIILVLFLAVVGMGAKLYWDVSKSMDKTYETVERSKKSQVNLNNKEPFSVLLLGIDTGDDGRVEQGRSDTTIVATVNPRDKQTTLVSLARDTYVDIPGQGKQDKLNHAYAFGGASLAMDTVENYLNIPINHYVSINMAGLKELVNAVGGIEVNNNLTFSQDGYDFTIGKISLDGEQALSYSRMRYEDPNGDYGRQERQRKVIEGIVQKVLSLNSVSNYQEILTAVSDNMKTDLSFDDMKKIALDYRSAFGKVKQDQLQGTGFMQDGVSYQRVDEQELTRVQQELKNQLNTK

SEQ ID NO: 10756 - protein, 550 aa, Enterococcus faecalis
MSKKGSDIIVESLINHEVPYIFGIPGAKIDGVFDALVDKGPELILARHEQNAAFMAQGIGRLTGEPGLVIATSGPGASNLATGLVTATAEGDPVLALAGQVKRSDLSKLTHQSMNNAALFSPITKFSTEIQDPETLSENIANAYRIAKTAKKGATFLSIPQDVTDSPVTGEAIKPLSAPKLGHASAETIAALAERIKQAKLPVLLLGMRASARKVTAAIRELVAITGLPVVETFQGAGIISKELEEHFFGRVGLFRNQPGDRLLKRSDLVIAIGYDPIEYEARNWNAEKDARVIVIDEVQMEIDQYMQPEEELIGDMSKNILKLSEAFSEPILTEDAQDYLETLQEKLTIKEVKTSTIENRLHPLEIVQTLQEKTTNEMTVTVDVGSHYIWMARHFRSYEPRHLLFSNGMQTLGVALPWAISAALVRPNTQIISVSGDGGFLFSAQELETAVRLKQNIVHIIWNDGSYDMVKFQEEMKYNRSSGVDFGPVDFVKYAEAFGAKGVRVHSQAEFAAALEEGMQTEGSVIIDVPVDYSDNQELGKTLLPDQLY

SEQ ID NO: 10757 - protein, 234 aa, Enterococcus faecalis
MSEQYVYQHGTLGGLMESLMAGTAEIGTLLTQGDFGIGTLEGSNGEIILLDGTLYHANQTGEITILEGEELTPYAAVTRFQEDGAFPVSTETDENIKAQILEKISPNFFAAIKISGLFAKMHVRVAPKQEKPYPPFVEAARNQPEFTAENIQGTVVGFFTPKLFHGASAAGFHLHFISEDHQFGGHILDFGIKQGTVSWMETAELRQHFPVHDADYRNKEIDIAKALSAIEEAE

SEQ ID NO: 10758 - protein, 89 aa, Enterococcus faecalis
MKQDIHPNYQPVVFMDSTTGFKFLSGSTKGSSETVEWEDGNTYPLLRVEVTSDSHPFYTGRQKFTQADGRVDRFNKKYGLKDENANPDA

SEQ ID NO: 10759 - protein, 479 aa, Enterococcus faecalis
MTMEHHQLRAFPQDFLWGSASAAYQVEGAWNEDGKGASVWDEFVRLPGKTFKETTGDLAVDHYHRFKEDVALMKQQGLKAYRFSIAWTRILPEGRGQVNQAGLKFYSDLIDELLAAGIEPMVTLYHWDLPAVLQKEYGGWESRKIIADFVAYAKILFDAFRGKVRYWISLNEQNVFTSLGYQLAVHPPGVTDNKRMYEANHIANLANAAVINAFHELEMPGKIGPSFAYTPVYAVDAHPANVLAAENAEDLLSHFWLDVYLWGEYPIAALNYLKEQGVAPTIKEGDLALLRSAKPDFLGINYYRTDTVAANPLDGVGIGKMNTTGEKGSETESGVPGLFKKVNNPYVERTNWDWAIDPQGLRIALRRLASRYQVPILITENGLGEYDTLTEDKQIHDTYRIDYLRSHIQAIQEAITDGVSVIGYCTWSYTDLLSWLNGYQKRYGFVYVDQDETQKGSLERIPKDSYYWYQKVIETNGLI

SEQ ID NO: 10760 - protein, 570 aa, Enterococcus faecalis
MSFDGVFTHSMVHELTETLVSGRISKIHQPYENEVVLVIRAKGKNHKLLLSAHPSYARIQLSTITYSNPETPPNFVMMLRKFLDGAILETIQQIENDRVIHFTFSKRDELGDLQNIVLIVELMGRHSTIVLVNQSSGKILDAIKHIGMSQNSYRSLLPGATYIEPPKPMGLNPLTAAKEEVFALLSTAPELNGRYLQQHFQGLGKDTADELSARLLAQPNEKMAIWTEFWSSVTEAVVPTLTVTEKKEYFTPIPYQSLVGEQTTYATLSELLDAFYSGKAEKDRVKQQGGELIRKIENELKRNQKKLKKLQQTLADTENAENYRRDGELLTTFMAQVPKGATEVELPNYYEENAPLRISLNPALSPNQNAQKYFQKYQKLKNAVRVVKTQIQQTQQEISYLESVVAQLEIATPMDIEVIREELIEQGYLKRKKNKKQKQPKKSQPDLFYATDSTPILVGKNNLQNDQLTLRTAKKTDYWLHAKDIPGSHVIIRDAHPSEETLTEAALLAAYFSKYRLSSQVPVDYVQVKHVHKPNGAKPGYVIYENQRTLYVTPTEESIKKIQQNKASAS

SEQ ID NO: 10761 - protein, 393 aa, Enterococcus faecalis
MYRMKLQVTKKAEHKFKKGYPLIQKEDLQQVPAPLPTDWLTLIDSKGQRLAEGYLGEQNKGIGWLLSWHGPINQSFFQQLFEISREKRTSFEKDSLTTAYRLFNGEGDGIGGVIIDRYADYAVFSWYNETLYQKKAELLTAFRTVYPDIIGAYEKIRFSTKDLPESQFLYGEQAPEPLLVTENGVQFATYLNEGLMTGIFLDQKEVRGRLVDGFAVGKTVLNMFSYTGAFSVAAAMGGAVATTSVDLATRSLPKTTEQFEVNHLNLAPQKIIVMDVFDYFKYASRKGLSYDMIILDPPSFARNKKKVFSVAKNYGELVKDSIDILSDKGTLIASTNAANLSLAKYQKMVITALQEKNVRYKITDTYQLPADFQVNPNFPEGNYLKVLFIEIEK

SEQ ID NO: 10762 - protein, 82 aa, Enterococcus faecalis
MADLKGRFDDAKDKVEGTAKEAQGKVTDDKGKELEGKAQSTFADVKDKARDAGDDLKEGAEKLTDKVKEGFEDLKDKFSKDK

SEQ ID NO: 10763 - protein, 399 aa, Enterococcus faecalis
MSKEMLNALDVLEAEKGIPKDTVIEALQAALVSAYKRHYGQASNVEVEFEPKKGNIHVYAVKEVTEEVFDSQLEVSLKDAVALNGAYEIGDKIRFEVTPKDFGRIAAQTAKQVILQRVREAERTIIYNEFSEYENDIMQGIVERQDRRYIYVNLGKIEAVLSKQDQMPNEFYQPHDRIKVYVSRVENTSKGPQVFVSRSHPDLLKRLFEQEIPEVYDGIVEIVSVAREAGDRSKVAVRSTDPNIDPVGTCVGPKGQRVQAIVNELKGENMDIVEWNEDPAIYISNALNPAQVLDVIFDPENSKACTVVVPDYQLSLAIGKRGQNARLAAKLTGHKIDIKSESDMAEFYEQQANQEVAEVAEEMDEAIIHSDMTADDYENLAAEEAVVEAEITEELPEQE

SEQ ID NO: 10764 - protein, 798 aa, Enterococcus faecalis
MGKKRIYELAKEMNKASKDVVDKAHQLGMDVKNHMGAISSEQETKLRQAFGGGSTVNTQSKATNNQKQQTTQNKPANKKPMNNKPGEQRNNQNRPNNQSTNGQQRNNNNQNRHGQSNTQNRSNQTNTNNQNRNTQNNNGSTTNQNRTSQNNNGGNNQNRGGQNRNNNFGGGQNRNNRNNFNNQNRNRFNKKGKKGKHQQESAKPAVPARKFRELPDVLEYTEGMNVADIAKKIHREPAEIIKKLFMMGVMVNQNQALDKDTIELLAVDYGMEPQEKVQVDIADIDKFFEPEAVVEENLTTRPPVVTIMGHVDHGKTTLLDTLRHSRVTSGEAGGITQHIGAYQLDIDGKPITFLDTPGHAAFTSMRARGASITDITILVVAADDGVMPQTIEAINHAKAAKVPIIVAVNKIDKPGANPDHVKQELSEHELIPEEWGGDTIFVNISAKFNQNIDELLENILLIAEVEDLKADPTQKAIGTVIEARLDKGKGPVATLLVQQGTLHVGDPIVVGNTYGRVRVMTNDMGRRDKEAGPATPVEITGLNDVPQAGDRFVVFEDEKTARQAGEERAKRALLEQRSASSRVTLDNLFESLKEGELKEVNIIVKADVQGSAEAVSASLQKIDVEGVRVKIVHAAVGAINESDVTLAAASNAIIIGFNVRPTPQAKQQAEQEEVDIRLHRIIYKALEEIETAMKGLLDPEFEEKITGQMTVRELYKVSKVGTIAGCYVTEGFIRRDSGVRVIRDGIVIYEGKLASLKRFKDDVKEVKLGFECGAMIENFNDLRVDDAIEGFIMEEIKQ

SEQ ID NO: 10765 - protein, 625 aa, Enterococcus faecalis
MNQTANSKKKRYITGFDGIRTIAVIGVILYHLFPQVMRGGYLGVPIFFVVSGYLINDLLRQEWAENQTIDLKGFYVRRMKRLYPALIVMLLSAVSYITLFQQDLLNNIRSVVASSVFYYNNWWQIFKGFSYFDGFATQSPFVHIWSLAVEAQNYLIWPLLFILLERFVRKRGRIFSLVLIGALISVTLMAVLYVPGADPTRVYYGTDTRVFSILLGSALAYVWPSTRLKEEIPEASKKILNGAGLSALVLLVLAFLTLSDHTNFVYYGGMFLISLAATVLVAVTAHPGADMNRWLTNPVFTWIGKRSYGIYLYQFPIMIFYEAKIKTLSDHVFLHSLVEIALILVVSELSYRFIEHPLTRLSYKDVWTQFTEFLRKPWDLREKGTMAFMTVISVIAVFGLIVAPANAKSAQQEQLEKNIAKNQQKIEERKKEVQESGTKNSSTSTESSTKPSESQDVLPAQLTPEQVKKAQNLEITTIGDSVILDGASGLQDIFPKMIIDGEVGRQLYSSISLIGELDKKKMLKDTVLVSLGTNGPFTEAQFDEFMKALGNRKVYWINVRVPTRRWQNQVNSLLSQMDKKYDNLTVIDWFNYSNAHDDWFYDDRVHPNVAGGEQYTHFIAEKILQ

SEQ ID NO: 10766 - protein, 394 aa, Enterococcus faecalis
MTERHLFTSESVSEGHPDKVADQVSDAILDAILEKDPMARVACETSVTTGLVLVFGEISTTAYVDIQKIVRQTVKDIGYTRAKYGFDGETVAVLVAIDEQSPDIAQGVDAALEVRDQDEKDDIGAGDQGLLFGFAVDETPELMPLPIALSHRLVRRLAELRKEKVLPYLRPDAKSQVTVEYDDQGQPQRVDTIVISTQHDDETTLEQIEKDIKEQVINEVIPHELLDDETKYFINPTGRFVIGGPQGDAGLTGRKIIVDTYGGYARHGGGAFSGKDATKVDRSASYAARYIAKNIVAAGLAKKVEVQLAYAIGVAQPVSISINTFGTSALPESKLIEAVRKNFDLRPAGIIEMLDLRRPIYKQTAAYGHFGRTDIDLPWEQTDKVEALKASLAE

SEQ ID NO: 10767 - protein, 488 aa, Enterococcus faecalis
MAKETNVKLVTVSVFVATFMTAIEGTIVSTAMPTIVGSLHGMEIMNWVFSIYLLTNAMLTPIYGKLADKIGRKPVFMIGIIIFILGSSLCGFAQDMLTLIIARAIQGVGAGAILPVALTIIADMYSLDKRAKILGLNSAAWGIASIFGPLAGGFIVDTVGWHWIFFINVPIGLVLLGLISIFLVEPKRERTKMPMDILGSVTLMAVLLTLLLGFQMISDNGFTLVTFGCLSLSVLFFVAFVMIEKRAQDPVIDLHLFNQPTFVLVNLIAALISGFLMGIDVYIPMWMQGVLGKSAGIGGLVLAPMSLLWMAGSFIASSFMEKYAMKKVLTIGLSILLVGAIFLVVMPMAVPFWLFFVVSSVLGVGFGITITTTTVTAQSTVEPEKMGVATSFNTLVRTIGQTVMVSIFGVILNAGMFAKLEASALNVDADVMNQLVNPHTANLIPAALLKPLRGILYAGLHNVYLVGAGLVVVALLLNIFAKAQRAKV

SEQ ID NO: 10768 - protein, 222 aa, Enterococcus faecalis
MANVLEMKNIYKKYGEKHTEVIALKELSFAVQPGEFVAVIGPSGSGKSTFLTIAAGLQAPTSGEVIVGGQSLNKLTKKQRLAQRFQKIGFILQSSNLVPFLTVEDQFHLIEKVDKSRKNSELKEQLLETLGLKELRNSYPRDLSGGERQRVAIACALYHEPDVILADEPTASLDTEKAFDVVQLLAKEAKEKDKGIIMVTHDERLLKYCDRVVRIRDGELTE

SEQ ID NO: 10769 - protein, 49 aa, Enterococcus faecalis
MIGVSRIYLGVHFPSDILGGFCLGLAWLLLSYPIYLEKRFVWRFQSKQR

SEQ ID NO: 10770 - protein, 259 aa, Enterococcus faecalis
MEFQLDKDWRLQPIKGATGQTYMGIKETEKVFIKRNTSPLLAALSKEGLAPKMIWTKRTANGDVLTAQEWLEGRLLHADEIGKRNDVIDVLYQLHHSNLLKDMLKKIGGEVCTPLTMLKEYKRQLPKELKRNSYLKEVITYLYNHLPEYPETSYVAVHGDVNHRNWLVSNNYLYLVDWDSVMVADPAVDLGMILSHYVPRSGWNQWLLSYGLIPNESTVQRIYWYGLFSFLQEIVRHHQEGERRAMTAEILQLKRMFSS

SEQ ID NO: 10771 - protein, 820 aa, Enterococcus faecalis
MANFKNEKFYITRRNNMSYNHKEIEKKWQKYWAKNNCFNTLDDPNKEKFYALDMFPYPSGQGLHVGHPEGYTATDILSRMKRAQGYNVLHPMGWDAFGLPAEQYALDTGNDPAEFTKKNIETFRRQINSLGFSYDWNREINTTDPEYYKWTQWIFTKLYEKGLAYEAEVAVNWVPELGTVISNEEVIDGKSERGGYDVVRRPMRQWMLKITAYADRLLEDLELVDWPESIKDMQRNWIGRSEGANVTFKVAGTEESFTVFTTRPDTLFGATYTVLAPELELVKKITTPEQTAAVEAYIEETSKKSDLNRTDLAKEKTGVFTGAYAINPVNGQEIPIWIGDYVLASYGTGAIMAVPAHDERDYEFAKTFGIDILPVIAGGDITTEAYTGDGPHINSDFLNGLNKAEAIAKMNEWLEENHVGKKEVSYRLRDWLFSRQRYWGEPIPVIHWEDGTTTTVPESELPLRLPVTSDIRPSGTGESPLANIDEWVNVVDPETGMKGKRETNTMPQWAGSSWYYLRFIDPHNKNEIADFEKLKRWLPVDIYIGGAEHAVLHLLYARFWHKFLYDIGVVPTKEPFQKLYNQGMILGENNEKMSKSRGNVVNPDDVVAKYGADTLRLYEMFMGPLDASIAWNENGLEGSRKFLDRVWRLIVDEEGKMRDRITTINDGRLTKVYHQTVKKVTEDMANLHFNTAISQLMVFVNEANKVDALPYEYVEGFVQLLAPIAPHIGEELWQILGNEESLTYVPWPTYDEAALVEDEVEVVFQVNGKLRGKQNVARGLIKEELEQIAMNHEAVKEFIEGKTVRKVIAVPDKLVNIVAN

SEQ ID NO: 10772 - protein, 341 aa, Enterococcus faecalis
MSVLSAYSVLNAIYYKYYQVQLVFISKDGQWVKGPLLSERPQNKEVLHLTWAQTPEETGEFSGKRISPSEIYEEEAIVFPVLHGPNGEDGTIQGFMETINMPYVGAGVLASANAMDKIMTKYLLQTVGIPQVPFVPVLRSDWKGNPKEVFEKCEGSLIYPVFVKPANMGSSVGISKAENREELQEALEEAFRYDARAIVEQGIEAREIEVAILGNEDVRTTLPGEVVKDVAFYDYDAKYINNTIEMQIPAHVPEEVAHQAQEYAKKAYIMLDGSGLSRCDFFLTSKNELFLNELNTMPGFTDFSMYPLLWENMGLKYSDLIEELIQLALNRFKQRQEFYNN

SEQ ID NO: 10773 - protein, 474 aa, Enterococcus faecalis
MTRLWHVPVPVSEEQNIMKLTFWEVAQAVEASNDWQQWPDFPLTGIEFDSRKIVKGNLFVPLQGENDGHRFIESAMANGCQAAFWGQDLVDAPQQLPVLHVTDPLVAMQKLATYYLNKMQPNVIAVTGSNGKTTTKDLIAAVLSEKFVTYKTQGNYNNQIGLPYTILHMPDETEKLILEMGMDHAQEISFLSNLAQPEVAAITMIGEAHVENLGSRAGIAQAKMEIVDGLAKDGSLFVPSDEPLLEPLVEKVTQQVITFGFSQESQLQGIVTNEAKEQTSFKISDTQMTFTIPVPGTYNVTNALIAIGIGRYFQLTDSEIQKGLATAELTKNRTEWLKAANGAEILSDVYNANPTAMGLVLDSFSKMSKVGKRIAVLGDMLELGPDSAAMHQAMAQHLAPDAIEEVFLYGSEMAYLADKLQETYAPANIHSFKKEEKNELIEAVKKVLQPEDMVVLKGSNGMGLREVIDALLEK

SEQ ID NO: 10774 - protein, 536 aa, Enterococcus faecalis
MKTPETRKKSFFPKQNLGGYHLKFKELGLAPELLSAVERAGFEEATPIQSETIPLALAGKDVIGQAQTGTGKTAAFGLPMLNKIDADNRVIQGLVIAPTRELAIQTQEELFRLGRDKKIRVQAVYGGADIGRQIRGLKDRPHIVVGTPGRLLDHINRRTLKLETVETLVLDEADEMLNMGFLEDIEKIISQVPEQRQTLLFSATMPPAIKNIGVKFMKQPEHVKIKAKEMTADLIDQYYVRSKDFEKFDIMTRLLDVQTPELTIVFGRTKRRVDELARGLEARGYKAEGIHGDLSQQKRMSVLRSFKNGNLDILVATDVAARGLDISGVTHVYNYDIPQDPESYVHRIGRTGRAGKGGMSVTFVTPNEMGYLHVIENLTKKRMTPLRPPTEKEAFKGQLSAAVETIESDLEENGLDKYLESAEALLEKYSATDLAALLLKTVAKDPADAVPVKITPERPLPSNKKGFNKNGRGGGGGNNRNRNRGGNGKGGSYRGNKNHKDGDRNYKNSDRKNKDQRGGKRHNDKKRGFVIRENAK

SEQ ID NO: 10775 - protein, 308 aa, Enterococcus faecalis
MTIYTCTLNLAIDLFIETEELVPFVVNRTKEDDIQANGKGVNVSLILKMLGIDNTALGVKAGFTGNYVEDYLKEKEITTDFIEVAGTTRINVFTKVTQDQKEYKLVNKGPKLSEEHVQRFLKKISELRKGDYLCVSGSLPQGVSPSILIEISRICFEKQVFLILDSSYEEILDCLPYQPFLLKPNEEELQEWFHTEVQTKDDYIFYGQELLKRGAKNILLSLGSEGALFMNNEKVLSGNSPTGMVVNTACSGDAMLGTFLAGWHQGLSLEKNLKRSIAAGSSTAFRKGLTDFSDVQELEQQIKIQEEE

SEQ ID NO: 10776 - protein, 117 aa, Enterococcus faecalis
MIKGIGIDAVELSRIKPIVEKQGSFIQRVLTPNELTLFEKLSTKRQIEFLAGRFACKEAFSKAWGTGIGKVGLQDIEVLTEKTGAPYVANSPHNGKVFVSITHTDTMAIAQIVLESE

SEQ ID NO: 10777 - protein, 371 aa, Enterococcus faecalis
MVVGWHRPTRLHIDTQAITENVQKECQRLPEGTALFAVVKANGYGHGAVESAKAAKKGGATGFCVALLDEAIELREAGVQDPILILSVVDLAYVPLLIQYDLSVTVATQEWLEAALQQLTPESNTPLRVHLKVDTGMGRIGFLTPEETKQAVRFVQSHKEFLWEGIFTHFSTADEIDTSYFEKQAGRFKAVLAVLEELPRYVHVSNSATALWHPDVPGNMIRYGVAMYGLNPSGNKLAPSYALKPALRLTSELIHVKRLAAGEGIGYGETYVTEAEEWIGTVPIGYADGWLRHLQGFTVLVNGKRCEIVGRVCMDQCMIRLAEEVPVGSVVTLVGKDGNEENTLQMVAEKLETIHYEVACTFSQRIPREYN

SEQ ID NO: 10778 - protein, 472 aa, Enterococcus faecalis
MATYQLIAATGCPTGIAHTYMAQEALEQAAKRKGITIKVETHGQIGIENELTPAEIQGAEAIIIAADKDVQAERFAGKRIIDVPVSVGIKEADRLIEEALAGKGSIAAENQAVDELEQETQISSGNVGHSIYKNLMNGVSHMLPFVVAGGILIALSFAIWGIYSFDPESSQYNATAAMLKSIGDASMGMMVPILSAYIAEGIAKRPGLVVGFVGGLIANTGGTGFLGGILSGFLAGYFILLLQRVFKGLPKSLDGLKAIFLYPVIGVAVIGITMSLLADPMKAVNEGMMSFLASFQNSSPLVLGIIVGCMCAFDMGGPVNKAAYVTGTALLAQGNTSFMAGVSAACIAPPLITGFATLFFGKYFDTNERNAGLVNFILGSTHITEGAIPFAAKDPLKVLPIMMLGSSIAAVLTYMFGVQVPAPHGGFLVLPVVTHAVQWVLAILAGSLVGGLLLGFVQKSRIAKQEQSLSKK

SEQ ID NO: 10779 - protein, 930 aa, Enterococcus faecalis
MCRNIQAFVCYSLVFYAKVIQAQKKAGDFMKHIKNTWELFILDWKRIFKNPVATFLIVALMIIPSLYAWFNIKALWDPYSNTGELPIAVYSDDQTATFQDKSVNIGDEVLKNLKKNKQLGWRFVDSKKELDKGVQSGKYFAGIYLPKDFSKDLLSFTSGDINKPKIEYSINEKINAIAPKITSKGASSIQSQISEEFIKTASSTLIKTFNDIGYDIDKNMVSIQKVKSMILDTDANIGTIDTYAKQVTDLHGKMPELKEKLAKANDAMKYLPEVDALGEKIVELNGKMPSIKEQASVILTLQEKIPEIQNAGRQIAMIDEDFASVEQTMSEGIQDAKQGLEIIQQVQTALPDIRKLGDQANDLGNVTLDGANKLQEALPSITNSVEVTLKSIQQVATTTTSVVATIRQALDDGQLTPEEKQHINEVVQDFTTNIQRQQQAINDIIAFMKQLQENAGNHDLDGAIAQLSHVNDLLTDFSNRLNQLNALVQAGDISGVQNYLNEIDEMATNISSIVGSVDVNGISNTVSTILNKLTSTIQNAQGQLNKAQQIDFEGLLSSTSQTVTNAISLLEKYQAEMPAIKQEIHDANTMLNGNMETIVNGINRGADLYKNDLPVIQDKVSKAAAFMQNDYPGIRKDLTNTLKTVNEKMPDVEAALDKANELIINDWPNIKTGLHKAANAIRKGEKEVDLGEILKLLKLDANKESDFFTQPVEVKEHAVYPIANNGSASTPFYTALCLWVGAVLFSSVATTDVYLEGKDKKRFSKREQFSARMFTFIVMGIGQALIVTLGNYFALGVDVRNPAYSVWFAVLIAITFMIMVYVLVALFGNVGKGIAIIILVLSISGGGGNYPIQVSGKFFQMINPFLPFTHAVNLLRESAGGIYWPNAWFAIWIMVGISVVFSIGGAILYPHLEHRSKKFAALAQKSHLFH

SEQ ID NO: 10780 - protein, 397 aa, Enterococcus faecalis
MSKLIEFQHVSKFYKGGKVAVDDINLSFDKGEFICFIGTSGSGKTTSMRMLNRMTDPSKGKILIDGQDIQKINPVELRRQIGYVIQNIGLMPHMTIRENIVLVPKLLKVPVEERNKIAEKMIDLVELPREMLDRYPNELSGGQQQRIGVVRALAANQDIILMDEPFGALDPITRDSLQDLVKDLQERLGKTIVFVTHDMDEALKLANKIAIMSEGKVIQFDTPDNILRHPANEFVEELIGEDRLLQAKPDFTTVDEVMLNSAITITPEKSLQEAIKLMREKRVDTLLVVDNSHVLKGFIDVETLDQQRGKASSVGDILNKDVFFVQKTALLRDALQRILKRGLKYVPVVDEQKRVVGILTRASLVDIVYDVIWGDETTISEAVEAKQSESETDKEEA

SEQ ID NO: 10781 - protein, 346 aa, Enterococcus faecalis
MTEMLSTEDFDFDLPEELIAQTPLKDRASSRLLVVNKETGDMEDKHFHDILDELQPGDALVMNNTRVLPARLYGEKPETGGHLEVLLLTNTEGDTWETLIKPAKRAKVGTEIQFGDGRLKAVVKEELEHGGRIIEFKYDGIFLEILESLGEMPLPPYIKERLDDPDRYQTVYAEENGSAAAPTAGLHFTKELLEEIKAKGVHLVYLTLHVGLGTFRPVSVDNIEEHHMHSEFYRLTEEAAKQLNEVRQAGGRIVAVGTTSIRTLETIGTKFNGEIQADSGWTDIFITPGYQFKVVEAFSTNFHLPKSTLVMLVSAFAGKDLTLAAYQHAIEEKYRFFSFGDAMFIK

SEQ ID NO: 10782 - protein, 356 aa, Enterococcus faecalis; identical to SEQ ID NO: 4875

SEQ ID NO: 10783 - protein, 750 aa, Enterococcus faecalis
MFHSMICQNCQQNEATIHLYANVNGQRKQLDYCQSCYQKLKNQANNSPQNMGQDPFGFGSLDDLYRSLSRQMQQGNPYEQQTPPTQFGDGGNGGQPPRGGAGAGQGLLGEYGINITEAARQGDIDPVVGRDQEIKRVIEILNRRTKNNPVLIGEPGVGKTAVVEGLAQKIVDGDVPQKLLDKEVIRLDVVSLVQGTGIRGQFEERMQKLIEEITEAENVILFIDEVHEIVGAGAAGDGNMDAGNILKPALARGELQLVGATTLNEYRIIEKDAALERRMQPVQVDEPTVAETITILHGLQKRYEDYHHVKYTDEAINAAANLSNRYIQDRFLPDKAIDLLDESGSKMNLTIQLVDPKTIDKKLAEAEQQKQQASAEEDFEKAAYYRDQINKLQAMKEKQISDEETPVITEKDIEAIVEQKTGIPVGDLKEKEQTQLKNLAVDLKAHVVGQDDAVDKVAKAIRRNRVGLGKQNRPIGSFLFVGPTGVGKTELAKQLAFELFGSEDSMVRFDMSEYMEKHSVSKLIGSPPGYVGYDEAGQLTEKVRRNPYSLILLDEIEKAHPDVLHMFLQILDDGRLTDAQGRTVSFKDTIIIMTSNAGTGAVEANVGFGAAREGVTKSVLGQLNNFFTPEFLNRFDGIIEFKALSKENLMNIVSLMLEEVNSLLAKQKLHIEVPTEVKEKLVDLGYDPAMGARPLRRTIQEQIEDGIAEYYLDHPENHQLVAALDNEGKIIVTGAQEVTKTETSTSDQAE

SEQ ID NO: 10784 - protein, 88 aa, Enterococcus faecalis; identical to SEQ ID NO: 4943

SEQ ID NO: 10785 - protein, 575 aa, Enterococcus faecalis
MSEMLKGIAASDGVAVAKAYLLVQPDLSFNKTSVEDTDAEATRLDDALAKSTEELQAIRDKAAQSLGEAEAQVFDAHLMVLSDPEMVGQIKQNIQDNKVNAEAALKEVTDMYIGMFEAMDDNAYMQERAADIRDVAKRILAHLLGVTLPNPSMINEEVIVVAHDLTPSDTAQLDRTYVKAFVTDIGGRTSHSAIMARSLEIPAIVGTKEITDKVKAGDILAVNGIIGDVIIDPTDAEKSEFEAEAKAYADQKAEWDKLKNAETVTADGKHVELAANIGTPKDLEGVHKNGGEAVGLYRTEFLYMDSSDFPTEEDQYQAYKAVLEGMEGKPVVVRTMDIGGDKELPYLTLPHEMNPFLGYRALRISLSELGDGMFRTQMRALLRASVHGNLRIMFPMVATLKEFRAAKAIFEDEKQKLVNEGVEVSNDIQVGIMIEIPAAAVLADKFAKEVDFFSVGTNDLIQYTMAADRMNERVSYLYQPYNPSILRLIKNVIDAAHAEGKWAGMCGEMAGDQTAVPLLLGMGLDEFSMSATSILKTRSLMKRLDTTKMAELADRALKECDTMEEVVALVEEYTK

SEQ ID NO: 10786 - protein, 640 aa, Enterococcus faecalis
MNINDLLIKDVMIMDLQATDKKGAIDEMVQKLYDGGRISDIDTYKEGILKREAQTSTGLGDGIAMPHAKNSAVKEPTVLFAKSKKGVDYEALDGQPTYLFFMIAAPEGANDTHLQALAALSRLLIDPEFVGKLKEAETPEAVQALFQAAEDQKEAEEKAEQEQTTPAPESNRKYIIAVTACPTGIAHTYMAEDALKKKAKEMGVDIKVETNGSEGIKNRLTAEDIARADGVIVAADKKVEMNRFDGKKLVNRPVSDGIRKTEELINLAISGEAPTFHGSDSAASDQEDSAEGSIGSRIYKDLMNGVSHMLPFVIGGGIAIALSFMIDQFIGVPQDQLANLGNYNDVASWFNQIGGAAFGFMLPVLAGFIASSIGDRPGLVAGFAAGALANAGGAGFLGALIGGFLAGYVVVLLRKVFKGLPKSLDGIKTILFYPVFGLIITGLLMLVINIPMKAINDALNHFLLGLDGTNAALLGALLAGMMAIDLGGPVNKAAYVFGTATLASTVAEGGSVVMASVMAGGMVPPLAIFVATRLFKNKFTKDQQDAGLTNIVMGLSFVTEGAIPFAAADPLRVIPSFVVGSAFTGALVGAFGIKLLAPHGGIFVVFLLSNPLLYLLFILIGAIISGIVYGLLKKPVEVPA

SEQ ID NO: 10787 - protein, 305 aa, Enterococcus faecalis
MIYTVTLNPSIDFIVHVDHLQIGDLNRMTNDFKLPGGKGINVSRILKRMETESTALGFLGGFTGSFIADWLKKEEIQTNFTPVSADTRINIKLKSDTETEINGLGPALTNEEIQELKQAVSRVQAGDIVVLSGSTPASLRKGFYEELIQIVKEKGAEFVIDTTGEDLMNALSQKPLLVKPNNHELAELYHTTFTSVEDILPYGHRLLEEGAQHVIISMAGDGALLFTTEGVYRSNVLKRPLKNSVGAGDSMIAGFIGNFSKTQDPLEAFKWGVACGSATAFSDDLASEDFIQELIHEVTIEKISE

SEQ ID NO: 10788 - protein, 752 aa, Enterococcus faecalis
MTQKHALVQGMNPRQEEAVLHTEGPLLVMAGAGSGKTRVLTHRIAYLIEEKEVNPWNILAITFTNKAAKEMKERVNKLLETGGEDVWVSTFHSMCVRILRRDVDQIGYNRNFTIIDPSEQKTLMKRILNDLNIDSKKYDPRSILGTISNAKNELQTPEKVAEMQGSLYEEIVAKCYEAYQKELRKNQCMDFDDLIMNTIRLFNEQPDTLAFYQNKFHYIHVDEYQDTNHAQYTLVNLLAARFKNLCVVGDADQSIYGWRGADMQNILDFEKDYPDASVILLEQNYRSTKNILAAANDVIKNNRNRREKELWTENIDGEKIVYYRGDTERDETQFIVSQIQKEMRENDRIYGDFAVLYRTNAQSRVVEEMLLKSNIPYTMVGGHKFYDRKEIKDILAYLSLIANPDDSISFERIVNEPKRGIGKSSIEKLRLFADTHGWALLEAAQNVDLANISGKAGKELGNFGMMIQDLTKTVPYLTITELVKETLQRSGYREALMAQNNLESQARLENLDEFLSVTQEFDKRFEAQNNDDPNGEETKLADFLTDLALVSDLDNLEESSSQVTLMTLHAAKGLEFPVVFLMGLEEGVFPLSRAMLEESELEEERRLAYVGITRAEEALFLTNAYSRTLYGRTQYNRPSRFLEEIEAERLMKQGAAANLQKAPARTFDPKVFKPSASKPAYTQPATKSVSNKVASGGEKVSWQAGDKVQHKAWGVGTVVRVGGSAKDLELDIAFPEKGIKRLLAAFAPIEKI

SEQ ID NO: 10789 - protein, 682 aa, Enterococcus faecalis
MRRSSTMEQQPLTLTAATTRAQELRKQLNQYSHEYYVKDQPSVEDYVYDRLYKELVDIETEFPDLITPDSPTQRVGGKVLSGFEKAPHDIPMYSLNDGFSKEDIFAFDERVRKAIGKPVAYCCELKIDGLAISLRYENGVFVRGATRGDGTVGENITENLRTVRSVPMRLTEPISVEVRGECYMPKQSFVALNEEREENGQDIFANPRNAAAGSLRQLDTKIVAKRNLNTFLYTVADFGPMKAKTQFEALEELSAIGFRTNPERQLCQSIDEVWAYIEEYHEKRSTLPYEIDGIVIKVNEFVLQDELGFTVKAPRWAIAYKFPPEEAETVVEDIEWTIGRTGVVTPTAVMAPVRVAGTTVSRASLHNADFIQMKDIRLNDHVIIYKAGDIIPEVAQVLVEKRAADSQPYEMPTHCPICHSELVHLDEEVALRCINPKCPAQIKEGLNHFVSRNAMNIDGLGPRVLAQMYDKGLVKDVADLYFLTEEQLMTLDKIKEKSANNIYTAIQGSKENSVERLIFGLGIRHVGAKAAKILAEHFGDLPTLSRATAEEIVALDSIGETIADSVVTYFENEEVHELMAELEKAQVNLTYKGLRTEQLAEVESPFKDKTVVLTGKLTQYTREEAKEKIENLGGKVTGSVSKKTDIVVAGEDAGSKLTKAESLGVSVWNEQEMVDALDASHF

SEQ ID NO: 10790 - protein, 108 aa, Enterococcus faecalis
MIERRVSMAITEEQVKHVAKLSKLSFSEEELADFTNQLDKIIDMVELLEEVDTTGVPFTSNVNESINVMREDVATPGMDRKELMRNVPESENGYIKVPAIMDNGEAGA

SEQ ID NO: 10791 - protein, 489 aa, Enterococcus faecalis
MEKLYDKSLTELHDLLVSKEITAVDLTEETLNRIQDTEEQLGSFITVSEEKAMALAKAIDLKGITESNPLAGIPIGIKDNIVTKDILTTAGSKMLHNFDPIYDATVMDKVYQADMIPVGKLNMDEFAMGGSTETSYFKKTKNAWDQTKVPGGSSGGSASAVAAGQVPVSLGSDTGGSIRQPAAFNGIVGLKPTYGRVSRFGLIAFASSLDQIGPLTRNVKDNALALNAISGYDEKDGTSAGVSVPDFTADLTGDIKGMKIALPKEYLGEGVQPDVREAVLKAAETFKSLGATVEEVSLPHSKYGVAVYYIIASSEASSNLQRFDGIRYGYRSDNVQNLEDVYVNSRSEGFGTEVKRRIMLGTFSLSAGYYDAHFKKAGQVRTLIKQDFENVFADYDLIIGPSTPTVAFGLGENINDPITMYMNDILTIPVNLAGLPGMSIPAGFSEGLPVGLQIIGKHFDEHTMYKAAYAFEQATDFHTKKPVILGGND

SEQ ID NO: 10792 - protein, 476 aa, Enterococcus faecalis; identical to SEQ ID NO: 4884

SEQ ID NO: 10793 - protein, 362 aa, Enterococcus faecalis
MKKARVIYNPTSGKELIKKNLADILSILEECGYEASAFATTPEENSARNEAHRAARAGFDLLVAAGGDGTINEVVNGIAPLKRRPKMAIIPAGTTNDYARALKIPRDNIVKAAEVIKKNQTVKMDIGQAGKNYFINIAAGGHLTELTYEVPSELKSIFGYLAYLAKGAEMLPRVKPIKMRMTYDEGVYEGNASMFFLGLTNSVGGFEQIVPDAKLDDGKFSLIIVKTANIFEILHLVALMLNGGKHVEDHRLIYTKTSYLHAETLEKNNKMMINLDGEYGGDAPMTFKNMHQHIEIFANCDALPSNAIMGSVLTGSDEIVVESEDEEEEAYNEASKEFVKEVERLTDEDIDGDGKIAEKEKH

SEQ ID NO: 10794 - protein, 314 aa, Enterococcus faecalis
MKKLRELTVEELFESFVLIKNADVRVAKNGKKFIAFTFQDTSGTIDGKYWDASEDEITRFTAGNVVLLNGKREVYQNKPQVKILHMRLATAEEPSQPSLYMERAPLKKEEMVEEINQVIFEITNAHWNRIVRYLMTKYQQEFYEFPAAKRNHHAFANGLAYHTVSMLRLGKAIAKEYPEINTSLLYAGIILHDLGKVLELSGAITTEYTVAGNLIGHLVLVDEEITKACLALKIDDREEDVVVLRHMVLAHHGLLEYGSPVRPRIMEAEILHQIDTMDASIQMMLGAIRQTQPGEYTERIFGLDNRSFYVPKDK

SEQ ID NO: 10795 - protein, 316 aa, Enterococcus faecalis
MKYQVLLYYKYTTIEDPEAFAKEHLAFCKSLNLKGRILVATEGINGTLSGTVEETEKYMEAMQADERFKDTFFKIDPAEEMAFRKMFVRPRSELVALNLEEDVDPLETTGKYLEPAEFKEALLDEDTVVIDARNDYEYDLGHFRGAVRPDIRSFRELPQWIRENKEQFMDKKIVTYCTGGIRCEKFSGWLLKEGFEDVAQLHGGIANYGKNPETRGELWDGKMYVFDDRISVEINHVDKKVIGKDWFDGTPCERYINCANPECNRQILTSEENEHKHLGGCSLECSQHPANRYVKKYNLTEAEVAERLALLEAVEV

SEQ ID NO: 10796 - protein, 722 aa, Enterococcus faecalis
MKRKHFLLSFFVMMVTLLTFISGTSAHAEGKKYTIGTDLTFAPFEFQDSKGKYIGIDVDLLDAIAKDQGFEVDLKPLGFDSAVQAIQSKQIDGMIAGMSITDERKKSFDFSDPYFDSGLQLAVKKGNDKIKSYDDLKGKTVAAKVGTESANFLEKNKEKYDYTIKNFDDATGLYKALENGEADAIVDDYPVLGYAVKNGQKLQLVGDKETGSSYGFAVKKGQNPELIKKFNAGLKNLKDNGTYDKILNNYLATGDETNTQDAGEQMKKITPKKEKYVIASDSTFAPFEFQNAQGDYVGIDVDLVKRAAELQGFTVEFKFIGFSSAVQAVESGQADGMVAGMTITDDRKKAFDFSVPYFDSGIQIAVKKGNDKIKSYDDLKGKKVGVKIGTESADFLEKNKKKYDYSIKYLDTTDALYSALEIGEVDAMMDDYPVIGYGVAQNQPLATPIPREKGGSYGFAVKKGQNPELLEMFNEGLKEMKRTGEYDKIIGTYVKDGNEAKEETADESTFVGFMQNNWKQLLHGLWMTILLTLISFVLALIVGVIFGLFSVSPIKALRVLSTIYVDLIRGIPLMVLAFFIYFGLPGVLGFNIPVFIAGIITLTLNASAYISEIVRGGIKAVPVGQMEASRSLGLSYNRTMQKIILPQAIRIMIPSFINQFVISLKDTTILSAIGLIELLQTGKIIVARTLQSTMVYFVIALIYLILITSLTKLAKNLEKKVN

SEQ ID NO: 10797 - protein, 939 aa, Enterococcus faecalis
MANDKIVIHGARAHNLKNIDVTIPRDKMVVVTGLSGSGKSSLAFDTLYAEGQRRYVESLSAYARQFLGQMDKPDVDSIDGLSPAISIDQKTTSKNPRSTVGTVTEINDYLRLLFARVGHPICPNDHIEITSQSVEQMVDKVLELPERTKIQILAPVVVKKKGQHKKVFEMIQREGYVRMRVDGETYDVSEAPELEKNKKHDIAIVIDRIVVKEGIRSRLFDSFEAALRLAEGYAIVGVIGQEEMLFSEHYACPYCGFTVGELEPRLFSFNAPFGACPDCDGLGVKLEVDKDLVIPDPTKTLREGAIVPWNPISSQYYPQMLEQAATSFGIDMDTPFEELPADQQEIILNGSGEKNFHFHYENDFGGVRDVEVPFEGILKNIKRRYHETNSDFTRDQMRLYMTELTCRSCQGYRLNPQALAVKINGTHIGEVSELAIKNAVQFFEGVSLSEQEITIARPILKEVEDRLTFLKNVGLDYLTLSRAAGTLSGGEAQRIRLATQIGSNLSGVLYILDEPSIGLHQRDNDRLIDSLKKMRDLGNTLIVVEHDEDTMMASDYLIDVGPGAGHLGGEIVAAGTPEEVAKNPHSLTGQYLSGKKVIPVPKERRKGNGKAIKVTGASENNLKNVSVEFPLGEFVAVTGVSGSGKSTLVNQILKKALAQKLNRNSNKPGKHKSITGYEAIEKIVDIDQSPIGRTPRSNPATYTSVFDDIRDLFAQTNEAKVRGYKKGRFSFNVKGGRCEACRGDGIIKIEMHFLPDVYVPCEVCHGKRYNSETLEVHYKGKNISDILDMTVEDAVEFFKHIPKIHRKLQTIVDVGLGYVTLGQPATTLSGGEAQRMKLASELHKNSNGKNFYILDEPTTGLHTDDIARLLLVLERLVEAGNTVLVIEHNLDVIKSADHVIDLGPEGGDGGGTIVATGTPEEVAKVKDSYTGYYLKRVLK

SEQ ID NO: 10798 - protein, 334 aa, Enterococcus faecalis
MSMLFFYERIEIFIRMIEKLSLIRPGCYNIVMQVKGVLNMPENLQLVIITGMSGAGKTVAVQSFEDMGYFCIDNLPPSLIPKFWELIKESGKVTKIALVIDLRSRTFFREIQDMLVELENTNFIDTTILFLDATDEELVSRYKETRRAHPMAMDGLVTEGIRKERAMLEEIKADAQLVIDTTDLSPRQLRERLNKELATRETHEFRVEMVSFGFKYGLPIDADIVMDVRFLPNPHYIDELRPLTGMDQPVYDYVMGFPETDEFYTKFIDLLRTVLPGYKKEGKSSVTIAIGCTGGQHRSVALTERVGAELKEEDYHVNITHRDRLKRKETVNRS

SEQ ID NO: 10799 - protein, 331 aa, Enterococcus faecalis
MKTYRIRKPKIVVVGGGTGLPVILKSLRNQSVDITAVVTVADDGGSSGELRSSINNMTPPGDLRNVLVALSDMPQLYEDIFQYRFDKSDSHFANHAIGNLIIAAVSEMRGSTYEAIQLLSKMMHVDGRIYPSSERPLTLHAVFKDGSVAVGESKIALDRKTIDHVFVTNTHGEEQPRAARKVVKAIEEADMVVLGPGSLFTSILPNLVITEIGEAIKQTAAEVVYICNIMTQKGETEHFTDADHVRVLNEHLQAQFVDTVLVNTEKVPENYMDPEIYDEYLVQVKHDFQGLREEGCRVISTDFLELRDGGVFHDGEKVVEELFRIVFGTKY

SEQ ID NO: 10800 - protein, 311 aa, Enterococcus faecalis
MSFASDVKKELTGLEVHREHAKAELAALIRMNGSLSLVNQQFVLNVQTENAAIARRMYSLLKDHYHAQAELLVRKKMKLKKNNVYIVRLKQDTQKILADLDIMDGVVFNGNVSNEIMGNAQKMRSYLRGAFMASGSVNNPETSRYHLEIFSIYEEHNNDICKMLNYYDLNARTLGRRNGYICYLKGAEKIADFLTLIGATNSMLKFEDVRIVRDMRNSVNRLVNCETANLNKTIDAASKQIENIQFIESTVGLTSLPEKLQEIAELRLEYPEVSLKELGEMIPSGAISKSGINHRIRKINEFAEKLREKSA

SEQ ID NO: 10801 - protein, 518 aa, Enterococcus faecalis
MAIKAEEISALIKEQIENYQQQLAVEEVGTVTYVGDGIARAHGLENAMSGELVEFSNGSYGMAQNLETNDVGIIILGDFETIREGDKVQRTGKIMEVPVGEALIGRVVNPLGQPLDGLGEIKTDKTRPVEATAPGVMQRQSVAEPMQTGLKAIDALVPIGRGQRELVIGDRKTGKTSIAIDTIINQKGQDVICIYVAIGQKESTVRNQVETLRKFGALDYTIVVTAGASQPAPLLYIAPYAGTAMGEEFMYNGKHVLIIFDDLSKQAVAYRELSLLLRRPPGREAYPGDVFYLHSRLLERAAKLSDELGGGSMTALPFVETQAGDISAYIPTNVISITDGQIFLESDLFYAGTRPAVDAGLSVSRVGGSAQIKAMKKVAGTLRLDLASYRELEAFTQFGSDLDAATQAKLNRGRRTVEILKQKLHAPLPVEKQVLILYALTHGFLDSVSVDKILHFEQDLFDYFDGKHADLLETIRTTKDLPDTDALDAAITEFSEMFAAANNSGDSAKEALEKIDNA

SEQ ID NO: 10802 - protein, 602 aa, Enterococcus faecalis
MAIIAHVDHGKTTLVDELLKQSDTLDGHTQLQERAMDSNALESERGITILAKNTAVDYNGTRINILDTPGHADFGGEVERIMKMVDGVVLVVDAYEGTMPQTRFVLKKALEQKVTPIVVVNKIDKPSARPEHVVDEVLELFIELGADDDQLDFPVVYASALNGTSSESDDPADQEPTMAPIFDKIIEHVPAPVDNSDEPLQFQVSLLDYNDYVGRIGIGRVFRGTMKVGDQVALMKLDGSVKNFRVTKILGFFGLQRVEIDEAKAGDLIAVSGMEDIFVGETVVDVHNQEALPILHIDEPTLQMTFLVNNSPFAGREGKYITARKIEERLMAELQTDVSLRVDPIGPDSWTVSGRGELHLSILIENMRREGYELQVSRPEVIEREIDGVKCEPFERVQIDTPEEYMGSVIESLSLRKGEMQDMINAGNGQMRLIFLAPARGLIGYSTEFLSMTRGYGIMNHTFDQYLPMIQGTIGGRHQGALVSIDTGKATTYSIMSIEERGTVFVEPTTEVYEGMIVGENNRDNDLTVNITKAKQMTNVRSATKDQTSVIKKPKKLTLEESLEFLNEDEYCEVTPESIRLRKQILNKNEREKASKKKKKAE

SEQ ID NO: 10803 - protein, 589 aa, Enterococcus faecalis
MSALQELLKDTFGYDDFRSGQETIIRHVLRQENVLGIMPTGGGKSICYQLPALLLDNLTLVISPLISLMKDQVDALNLMGIPATYINSTISYQEMNQRIQLAVNKEVKLLYVAPERLESYDFQQMLTHVPIDLLAVDEAHCISQWGHDFRPSYLRLAEIIDQFQQQPTVIALTATATPQVAEDIVKQLRIPSENEIKTGFARENLSFQVVKDQNRDVFLLEYLKMNTGQSGIIYASTRKEVERIYHLLESKKIAAGMYHGGMSEQLRSENQEAFLYDQVQVMVATNAFGMGINKSNVRFVIHAQVPGNIESYYQEAGRAGRDGLPSDAVLMFAPQDLQIQQYFIEQSEMTIDYKQKEYLKLREMSQYANAQMCLQKYILRYFGEEGTDCGRCSNCLDNRELVDITVDAQKVLSCVKRMGERFGKGLVGKVLTGSKDQKIDQWHFDRLPTYGLMKGRTQKEVTQLIDYLTAERYLIPSDGQFPLLSVSTEGVQVLLGERKVFRKEDQKVRKVAVDDALFERLRELRMDMAQEAGVPPYVVFSDSTLKEMCEKLPQTTIQLLQIKGVGQNKLDKYGTAFLEVIKEYQETKK

SEQ ID NO: 10804 - protein, 101 aa, Enterococcus faecalis
MDEGISKKFAIQLLEDDAERIKMLIRNQKNSLCISQCKAFEEVVDTQMYGFSRQVTYATRLGILTNDEGHRLLSDLERELNQLYTDVYEETQEKNEIGKEG

SEQ ID NO: 10805 - protein, 378 aa, Enterococcus faecalis
MGLIMVYSSTSALQVMKGFSPTSFVINQVAFWVVGLVAMFFIYKMKTSVFQNRSFIMFAIAVITVMVLAVRIPGIGKEINGARGWIEIGGFSMQPAEYLKIMVVWYLSYILARRQKTINGGMDQFKQAAGRPLMLVFVLIALVAIQPDFGNAAILTLITIVMVLASGINYMYTYLVGGLGILGSITAIQLLIMSKGKIFPARYQYIYNRFAVFKNPFLDERNLGHQLANSYYAISNGGWFGKGLGNSVQKKGFLPEAHTDFIFAITLEELGIIGGLAILGLLMFMIARIILVGVRSKKPFNSLMCIGIGTMLLIQVFINVGGITGIIPLTGITFPFLSQGGNSLLIISIAVAFVLNISADETRQKLENEYYLSLEQNQ

SEQ ID NO: 10806 - protein, 1142 aa, Enterococcus faecalis
MKKVLVANRGEIAIRIFRACTELDIRTVAIYAAEDEYSVHRFKADEAYLVGKEKKPIEAYLDIENIIQIAKKSGADAIHPGYGFLSENLRFAERCEEEGIIFVGPKTHHLDIFGDKIKAKEAAVAAGIASIPGSDGPVATVEEVVAFGETHGFPIMIKAALGGGGRGMRVAHDAKEAREGYERAKSEAKAAFGSDEVYVEKYISNPKHIEVQILGDHHGNVLHLFERDCSVQRRHQKVVEVAPCVSMNEEQRAAICSAAVQLMAHVGYVNAGTVEFLVEGDQFYFIEVNPRVQVEHTITEMITDIDIVISQLQIAQGLDLHKDMHLPKQNELTLKGAAIQCRITTEDPLNQFMPDTGKIDTYRSPGGFGVRLDVGNAYSGYAVTPYFDSLLVKVCTHGFSFEQAISKMQRCLKEFRIRGVKTNIPFLQNVVSYPAFQSGEAKTTFIDNTPELFEFPRMRDRGNKTMKYIGEVTVNGFPGIERTEKKYFEAPRVPTDIEVPEKVITAKNILDAQGATAVIDWVKNQESVLMTDTTFRDAHQSLLATRVRTQDFKAIAGLTDVALPELFSSEMWGGATFDVAYRFLTEDPWQRLRKIRQLMPNILLQMLFRGSNAVGYQNYPDNVIEEFIKESARQGVDVFRIFDSLNWIPQMEKSIQVVRDTGKIAEAAICYTGDINDPARAKYNVQYYLDMAKELENLGAQIIAIKDMAGLLKPQAAYRLISELKAATDLPIHLHTHDTSGNGIITYSAATKAGVDIVDVAMSAMSGATSQPSMNSLYYALVNGERTPTINIDNAQKINHYWEDVRMYYQPFENGLNAPQTEVYMHEMPGGQYSNLQQQAKAVGLGHRWDEIKKMYHTVNLMFGDIVKVTPSSKVVGDMALFMVQNHLTEQDVYARGEELSFPESVVTFFQGDLGQPVGGFPKELQRIILKGRPAFTERPGDLAAPVDFAKVQEELAEKIGYQPKLEEVLSYLMYPQVFLEYRQKYETFGDITLLDTPTFFNGIRQGETLEVQIERGKTLIIRLDEIGEPDIDGNRVLFFNLNGQRREVLVKDASIKSAVQVKQKAEPTNKEQIGATMSGSVLQVLVKRGDKVEKGQPLLITEAMKMETTIEARFAGTVDHIYVEEGEAISSGDLLLEVKEK

SEQ ID NO: 10807 - protein, 369 aa, Enterococcus faecalis
MYGISVFLGEEITNDTIIYIKKMKALGFDGIFTSLHIPEDDTSLYRQRLTDLGAIAKAEKMKIMVDISGEALKRAGFSFDELEPLIELGVTGLRMDYGITIEQMAHASHKIDIGLNASTITLEEVAELKAHQADFSRLEAWHNYYPRPETGIGTTFFNEKNRWLKELGLQVFTFVPGDGQTRGPIFAGLPTLEKHRGQNPFAAAVGLMADPYVDAVYIGDPTISERTMAQFGYYYQTNQFLLEVAPNKSRYLKRILGTHTNRLDAARDVLRSELSRTSEMFRKDEIATIESEQTEARPVGTVTIDNEKYGRYMGEIQVTLVDLPKDEKVNTITRIIEKDQTILPLIKAGNQFTLVTEGTIENEFRKLNN

SEQ ID NO: 10808 - protein, 296 aa, Enterococcus faecalis
MNLENLTTERRNENTMGLDEMSVKEALQKMNQEDQKVAMAVGQELAAIEPVVEAIIKSFNQGGRLIYMGAGTSGRLGVLDAAECVPTFGVEPEMVQGLIAGGQKAMTVAVEGAEDSKELGRQDLVDLKLSANDIVVGIAASGRTPYVIGGLEYATTVGAATATVACNKDAEISKYAQMPIEVDAGPEFLTGSTRLKSGTAQKLILNMLSTISMIGIGKVYNNLMVDVKPTNEKLVERSKRIIMEATGCSYEVAELKFVEAEENVKLAIVMILTDSTKEEATQKLIDGNQFIKNTLN

SEQ ID NO: 10809 - protein, 484 aa, Enterococcus faecalis
MAEERIKRIADGIYKEVGGQENVDKVIHCMTRVRMDIRDYDKVDIEGLKKIDGVMGVVEDDTLQVVVGPGTVNKVAQEMVDQAGVKLGEPFNHGTTTDASAGKSGKDLVEEKAAQMKAQQKAKQNNTSPFKKVLKAISSIFVPMIPAFVGAGIIGGIAAVMSNLVVAGDISASWQQYIDVLNIIKNGIFAYLALYTGINSASVFGATPALGGVIGAVTMLTGMNPDAPISNIFTGGTLSAGQGGIIGVIFAVWLLSLLEKQLHKIVPESIDIIVTPTISLLVIGLATIFLIMPVAGAISNGLVGIINVVLEKGGMVAGFTLGLTFLPMVMFGLHQILTPIHIEMINQTGMTLLLPILAMAGAGQVGAALALWIRCKSDKKLVEMIKGALPVGILGIGEPLIYGVTLPLGRPFITACIGGGIGGAVIGAFGNVGAIAIGPSGVALIPLIANNQWLAYVLGLLAAYAGGFVATLFFGIPKDMQTTK

SEQ ID NO: 10810 - protein, 461 aa, Enterococcus faecalis
MFHFVIKGTGFSSKNLQEIKVYEETLFCIDEAGVIQEIIEPDAEAYETVLAEQKEAQRFQELPQDSYLLPGFVDLHVHAPQWAQSGTALDIPLYEWLNTYTFPLESKFADLTFAQQVYDELVTQLLANGTTTALYFATIHYEASRRLAEICAEKGQRGLIGKVVMDDLNENPEYYRDQTTQQALEETERFIQEIQTLAQQTKQGVYPVVTPRFIPSCTEEALKGLGELAAKYQVHVQSHCSESDWEHQFVQERFGKNDTQALNDFGLLTEKAVMAHAGFLEEADMNLFHETGTAVAHCPISNAYFGNAVTPIAKLVHQHQVEVGLGSDLSGGFSPSLFDNLKQAVISSRMLEDGVDATKKPEVRGVKTARITVNEAFYLATAGGGQALSLPIGKLEKGYAWDVQIINTSLSQARIPKNPGESLLDIFQKILYLARPENIREVWVQGEKVHDKNLMSATKGV

SEQ ID NO: 10811 - protein, 325 aa, Enterococcus faecalis
MKVFDYEDVQLIPNKCIVNSRSECDTTVTLGKHSFKMPVVPANMQTIIDETIAETLAENGYFYIMHRFDEEARVPFIKKMQQKGLITSISVGVKEGEYAFVETLAREGLVPDYVTIDIAHGHSNAVINMIQHLKKFLPETFVIAGNVGTPEAVRELENAGADATKVGIGPGKVCITKIKTGFGTGGWQLAALRWCAKAARKPIIADGGIRTHGDIAKSVRFGATMVMIGSLFAGHEESPGETKVEDGVVYKEYFGSASEFQKGEKKNVEGKKIWLRHKGKLADTLVEMQQDLQSSISYAGGRDLEAIRKVDYVIVKNSIFNGDTI

SEQ ID NO: 10812 - protein, 590 aa, Enterococcus faecalis
MLYLKSKNKKTNEVFSMSWEQVYQQWLNEENIPENLKNELKDLNTDPEKCEDAFYAPLEFGTAGMRGILGAGINRMNIFTVRQATEGLARFMDTQDPETKRRGVAIAYDSRHMSPEFAMEAAKTLAKHDIPSFVFESLRPTPELSFAVRYFKAFAGIMITASHNPAAYNGYKVYGEDGGQMPPADADALTKYVRSIENPLKIDVLSDEEVAHSGLINIVGEEVDNAYLKEIKTVTINQELINEMGKELKLVYTPLHGTGKMLGEKALKQAGFEKFVLVPEQAVADPDFTTVKSPNPEEHSAFEYAIRLGEKEGADLLIATDPDADRLGAAVRMPNGDYQVLTGNQLGSIMIHYILEAHQQAGTLPQNAAVLKSIVSSELATAIAEKYNTKMFNVLTGFKFIAEKIQQYEEDHSQTFMFGFEESYGYLVKPFVRDKDAIQALVLLAEVAAFYKKQGKTLYDGLQDIFEEFGYFEEKTISVTMSGIEGSGKIKALMAKCREQAPTEFAGIQVAQTEDFKELTRTFADGQTEQLQTPPSDVLKYHLEDGSWIAIRPSGTEPKIKFYLATKATSSSEASEKIAAFEAVVNELTK

SEQ ID NO: 10813 - protein, 433 aa, Enterococcus faecalis; identical to SEQ ID NO: 4863

SEQ ID NO: 10814 - protein, 279 aa, Enterococcus faecalis
MKIRVPATSANLGPGFDSCGIALSAYLTINVLGESEFWEIQHTLGEEIPTNEENLLIQTALKIAPELTPKVIRMVSDIPLARGLGSSSSVIVAGIELANRLAHLNLSPKEKVRLATEMEGHPDNVAPAILGDFVVASHVENQVYHVKHHFPMCDVIAFIPEEPLFTEKSRAVLPEKLTYKEAVAASSIANVMIAAILNGDLPLAGKMMEQDKWHETYRRSLVPHLKEIRRLTQQKGAYGSFLSGAGPTVLILSPEERTNEIVQSFGEIIYQSEHPNFQY

SEQ ID NO: 10815 - protein, 58 aa, Enterococcus faecalis
MSKTVVRKNESLDDALRRFKRSVSKAGTLQESRKREFYEKPSVKRKKKSEAARKRKKF

SEQ ID NO: 10816 - protein, 149 aa, Enterococcus faecalis
MSLLTTLNDDIKTAMKAKDKETLAVLRMLKTAIQNDQIKAGRELNGEEELTVLSREMKQRKDSLSEFEKAGRDDLVEKVKVEIAIVEKYMPQQLTEEEIRQLVQEVMTQTGATSPKDFGKVMGAMMPKVKGKADGNQVNAIVKELLQEN

SEQ ID NO: 10817 - protein, 300 aa, Enterococcus faecalis
MTTEHKSGFVAIVGRPNVGKSTLLNRIVGQKIAIMSDKAQTTRNKIQGIYTIPEAQIVFIDTPGIHKPKHRLGDFMVESAYNAMREVDATLFMVSADQKRGKGDDFIIERLKNNNSPVYLIINKIDKVHPDDLLSIIEDYSKQMDFKEIIPISATEGNNFEHLMDVLVEQMPEGPQYFPDDQITDHPEYFIVSELIREKVLLLTRDEIPHSVAVVVDSMKRDENDKVHVQATIIVERDSQKGIIIGKGGKMLKQIGTKARQDIEYLLDDKVYLELWVKVQKDWRDKKIYLQDFGYRKEEY

SEQ ID NO: 10818 - protein, 313 aa, Enterococcus faecalis
MSIKNIPRRKTMKNKLTVQEMILTLQKFWSSNGCMLMQAYDTEKGAGTMSPYTFLRAIGPEPWNAAYVEPSRRPADGRYGENPNRLYQHHQFQVVMKPSPENIQELYLESLKLLGIDPLEHDIRFVEDNWENPSMGCAGLGWEVWLDGMEITQFTYFQQVGGLQCHPVTSEITYGLERLASYIQEVESVYDLEWTQGVKYGEIFVQPEYEHSKYSFEISNQEMLLENFDKFEKEAKRCIEESLVHPAYDYILKCSHTFNLLDARGAVSVTERAGYLARIRNMARSVAKIFVAEREKLGFPLLNKDQHVSKEAE

SEQ ID NO: 10819 - protein, 323 aa, Enterococcus faecalis
MQEPLFLQPVFQEKIWGGNRLHTLFGFDLPSDKIGEDWAISAHPHGVSTVLNGEFKGKKLDELWADHQELFGHAGGAVFPLLTKILDAEDDLSVQVHPDDAYGQKHEGELGKTECWYIIDAEPGAEIIYGHHAKTKEELAEMIEEGRWDDLLRKVPVKKGDFYYVPSGTIHAIGSGILILETQQSSDTTYRVYDYDRTDDQGKTRELHIQQSIDVTTVPAKDPDLSIQQENQGQSSIVTYVKTDFFNVYEWRVSGILKVKKQAPYTLATVIEGVGRLITEDAAKADVATFDLKKGDSFIFPTDIPSWRFEGDLTIIASEPGSR

SEQ ID NO: 10820 - protein, 230 aa, Enterococcus faecalis
MVSKELVVCHLYGNLLNTYGDNGNLLMLKYLTEKMGVTFRSEIISIYEPFDPEKYDLVFVGGGQDFEQLIISEDIQNKKEALTSYIENDGVLLAICGGYQLLGHYYVGAQGEKIKGIGALDHYTLSQDNNRFIGDIEIYNEEFDETYYGFENHNGMTFLGEGERPLGTVKQGKGNNGQDNGEGVVYKNVFGSYFHGPILARNKNLGIRLIRTALEKKYGEPIAIPETLYK

SEQ ID NO: 10821 - protein, 280 aa, Enterococcus faecalis
MGIRSHLAIAAGKTSQWVLQTFFKGGSSYPGKLALKIDPKILDTLAKDYEIVVVTGTNGKTLTTALTVNILRQEFDEVLTNPTGANMEQGIVSTFLNAKAKKGQKKFAVLEIDEASLSRVTKYIQPKLFVFTNIFRDQMDRYGEIYTTYRLIMEGAAVAPEATILCNGDSPIFNSKETVNPRKYYGFNHLPPKEQLAHYNTDGVLCPKCNHILHYKMITYANLGDYYCPNCGFKRPELDVQLTEMVRMDNTSADFVIDGEEYGIAVGGMYNVYNALRPQR

SEQ ID NO: 10822 - protein, 314 aa, Enterococcus faecalis
MGKRVVVALGGNALGNNLTEQMTAVKQTSKAIADLIEAGYEVILSHGNGPQVGMIQLAMEEFSFNNPQYPVVPLSMCVAMSQSYIGYDLENALQEELRQRNISKAVTTIVTQVVVDENDPAFKKPTKPIGRFMTKEEAEQLVKEKNIQVMEDAGRGYRQVVASPKPKNIVELLTIQTLVDAGQTVIAGGGGGIPVIQEGNRLKGVNAVIDKDFCSERLAEQVDADLLVILTAVEKVCINFGKENQEALGNVSTEKMKQYAQEGQFAPGSMLPKVEAAIKFAESKPGRKTLITLLEKAKEGLSGKTGTLIENKES

SEQ ID NO: 10823 - protein, 860 aa, Enterococcus faecalis
MQEMYSIIVNGQSETCETNKKLMDFLREDLGLTGTKDGCNQGSCGACTVLVNGKASKACLFTLEKLAGKEVTTIEGLSQRQKDVYAYAFAKTGAVQCGYCIPGMVISAQGLLNKKPEPTKEDIQKAIRGNICRCTGYVKIIEAIQLAAKMFCEETSIPEEHSNGKLGEDFQRVDSVEKTLGTGIYVDDIDIEGMLHASALRSAYPRAKVLSIDSTQALAHPDCVAVFTAKDVPGNNKIGHLEFISDWDVMIPEGEITRYVGDAVALVVSKRKETLPEIKNLVEVDYEEMIPLTSCEAALAEGAPAIHEKGNILSHEHLVRGNTDEVLANSAFVVTEHYSVPINEHAFMEPECAIAQPEGEGILLFSAGQSIYDEQREVARMLGLDKEKIHVQSKLVGGGFGGKEDMSVQHHASLAAWLLKKPVKVLLSREESLMVHPKRHGMEMDFTTGCDEEGNLTAMKAVIYADTGAYASLGGPVLQRACTHAAGPYKYQTIDVEGFAVYTNNPPAGAFRGFGVCQTAFAIESNLNLLAEKVGLSPWEIRFKNAVAPGDTLPNGQLVSKNAALKEALLAVKDVYEQAEVAGISSFFKNSGVGVGLPDTGRCIISVEEGKIHVRTSAACIGQGMATVTTQIACETLNLPPEMIVAEAPDTRRTPNSGTTTASRQSLFTGEATRRAAMQLRYELDMGRALSDLEGEEFYGEYSAKTDPLINDKKSPVSHAGYGYAAEVAILDDKGKVAKFVAAYDMGQVVNPRAAEGQIEGGIAMGMGYALTEKFALEEGYVKAKYATLGLVNATQVPPIETILVHADNLHEGLAYGIKGVGELATIPTAPALAGAYFALDGQLRPSLPLENTPYQKKKR

SEQ ID NO: 10824 - protein, 472 aa, Enterococcus faecalis
MARKSRIKTPIAEQAPTIRKNNFEEVCLGYTLAEGQEEAIRCLQCKNAPCIAKCPVMIDIPGFILAIREGNMEQAADILSKYTNLPAICGRVCPQEKQCEQVCKLGKAKNFEPVAIGKLERLVADWALENHKFPKKTAEPTKGKIAVVGSGPSGLTVAGDLAKLGYEVIIFEALHEAGGVLTYGIPEFRLPKKIVKQEIASIEALGVTIETNVVVGKTITMEEIMSEFDACYLSVGAGAPNFMGIPGTSLNGVYSSSEFLTRINLMHSYEFPEYDTPIKRAKNVVVIGGGNVAMDAARSAKRLGAENVNIVYRRSLEELPARIEEYHHSLEEGINYYWLTNPIAYLDDQQGNLAGVECIKMVLGEPDVSGRRRPEPVPDSTFTIPADAVIEAIGQEANRVLLSTYPEIELNQWGYIQADPKTGATSILGVFAGGDIVTGAATVILAMGAGKIAANAIDQYVKTQKTTVTSNV

SEQ ID NO: 10825 - protein, 196 aa, Enterococcus faecalis
MNMAQLFFKYGAMNSGKTIEILKVAHNYEEQDKPVVLMTSGLDTRDGVGKVSSRIGLRRDAIPIFEETNVFDLINDLSYKPFCVLVDECQFLNKHHVIEFARIVDELDIPVMAFGLKNDFRNELFEGSKYLLLYADKLEELKTICWFCHKKATMNLHYIDGKPVYEGDQVQIGGNEAYYPVCRKHYFHPKTVNEEQ

SEQ ID NO: 10826 - protein, 357 aa, Enterococcus faecalis
MYDQLQSIEDRYEELGELLSDPAVISDTKRFMELSKEEANTRETVEVYRRYKQVVEGISDAEELLSENLDAEMAEMAKEELSDLKKEKEVLEDRIKILLLPKDPNDDKNIIMEIRGAAGGDEAALFAGDLFNMYQKYAEAQGWKAEVLEANVTGIGGYKEVIMMISGDNVFSKLKYESGAHRVQRVPSTESQGRIHTSTATVVVMPEAEEVEIELADKDIRVDIYHASGAGGQHVNKTASAVRLTHLPTGIVVAMQDERSQLKNREKAMKVLRARVYDQIQQEAQSEYDANRKSAVGTGDRSERIRTYNFPQNRVTDHRIGLTIQKLDQILAGKLDEIIDALVLYDQTSKLEEMQNG

SEQ ID NO: 10827 - protein, 412 aa, Enterococcus faecalis
MDYKTYDPDLWNAIAREEERQENNLELIASENVVSKAVMAAQGSILTNKYAEGYPGKRYYGGCEFIDIVENLAIDRAKELFGAKFANVQAHSGSQANTAAYLSLVEPGDTILGMDLSAGGHLTHGSPVNFSGKTYNFVSYGVDPSTEVIDYDVVRILAREHRPKLIIAGASAYSRTIDFKRFREIADEVDAKLMVDMAHIAGLVASGLHPNPVPYADIVTSTTHKTLRGPRGGLILTNSEELAKKVNSSIFPGIQGGPLEHVIAGKAAAFKEALDPSFAEYSQQVIANAQAMTKVFNQAPEARLISGATDNHLLLIEVTGFGLNGKEAEAILDSVNITVNKNSIPFEQLSPFKTSGIRIGTPAITSRGFKEEDAVEVAKLIVQVLKDPENTAVHDEVKAAVAALTKKYPLYN

SEQ ID NO: 10828 - protein, 209 aa, Enterococcus faecalis
MGKFQVIDHPLIQHKLTMIREKNCGTKVFREVVNEIAMLMAYEVSRDMPLEDVVIETPMGKSTQKTLSGKKVAIIPILRAGIGMVDGILELIPAAKVGHVGLYRDEETLQPNEYFVKLPEDIASRQLFVVDPMLATGGSAIMAIDSLKERGASNIKFVCLVAVPEGVKALQEAHPDVDIYTAALDERLNEDGYIVPGLGDAGDRLFGTK

SEQ ID NO: 10829 - protein, 233 aa, Enterococcus faecalis; identical to SEQ ID NO: 4966

SEQ ID NO: 10830 - protein, 218 aa, Enterococcus faecalis
MVLLTCIIVFAFVYACTRNMKLRPKGKQTVIEWLVDFIRGIITDNLPRKEVSNFHLMAFTLFMFVLVSNILGLVTKIVVGDDLSVWKSPTADPIVTLTLAMMMIVLTHFFGMKRFGFKGYLVNSYLRPVGFLLPVKLMEEFTNLLTLGLRLYGNIFAGEVLLGLIAGTVASVGLWVIPLAIPLEMIWVAFSIFIGCIQAFIFVTLSMVYMSHKIETEE

SEQ ID NO: 10831 - protein, 107 aa, Enterococcus faecalis
MSEMKQIDQLWILPTEAGYKIGLTAEAQEDLGKITFATFPKVGQTLAKGDSLIELEAEKAVSEFSSPLSGKVVAINEAADQEPSALDEENAWIAVLADVEPTEFENL

SEQ ID NO: 10832 - protein, 228 aa, Enterococcus faecalis
MNNRGLASFFDFSQIDISKLQEKTIETLYMTGISIIVVAILGLILGLLLFETSGRKGILSRLLYWLVAIFVNIFRSIPFIILIVLLIPFTKIILGSMSGVKGSLPALIISAAPFYARMVEIAFREVDKGVIEAAKAMGANRFQIIWKVLLPESLPALVSGLTVTTISLVGYTAMAAAIGAGGLGSLAYQDGFQRGQNTVTLVATICILIIVFAIQWIGDTVAKKIDKR

SEQ ID NO: 10833 - protein, 272 aa, Enterococcus faecalis
MKKRTLWSVITVAVAVLVLGACGNKKSDDSVLKVGASPVPHAEILEHVKPLLEKEGVKLEVTTYTDYVLPNKALESGDIDANYFQHVPFFNEAVKENDYDFVNAGAIHLEPVGLYSKKYKSLQEIPDGSTIYVSSSVSDWPRVLTILEDAGLITLKEGVDRTTATFDDIDKNTKKLKFNHESDPAIMTTLYDNEEGAAVLINSNFAVDQGLNPKKDAIALEKESSPYANIIAVRKEDENNENVKKLVKVLRSKEVQDWITKKWNGAIVPVNE

SEQ ID NO: 10834 - protein, 271 aa, Enterococcus faecalis
MLRFFPQKNKYVEEASQYAFDKEGQIPQHIAIIMDGNGRWAQNRRLPRIAGHKEGMDTVKKITKHASHLGVKVLTLYAFSTENWKRPTDEVNFLMQLPVDFFDTFVPELIKENVKVNVMGYQEFLPSHTQDAVKRAIEQTKDNTGMVLNFALNYGARAELLTAMKQIAAEVSEKAYTADEITEETIADHLMTGFLPTELRDPELLIRTSGEERISNFLLWQIAYSELFFTKALWPDFSGDTLETAIASFQNRNRRFGGLKETTETEGSDPQ

SEQ ID NO: 10835 - protein, 266 aa, Enterococcus faecalis
MRQRVITAIVALIIFIPIIWYGGFAIEIAAVALAVVGVYELFRMKGLTLLSFEGVLSALGAVFLVIPTIKWLNFLPEMQTNFILFYVTVMLLLGASVISKNTYTIEEAGFPVIVSLYVGMGFQNFISARSAGFEVLLFALFIVWATDIGAYLFGRRFGRHKLMPDVSPNKTIEGALGGILSAVVVAALFLVFTANKGLFPYPMPVMLVLTVLFSIVGQFGDLVESSIKRHYGVKDSGNILPGHGGILDRFDSLLFVFPIMHLCGLF

SEQ ID NO: 10836 - protein, 389 aa, Enterococcus faecalis
MKKFLENSIHQAIKACFFFLGKLPKKKLFIFESFHGKQYSDNPRAIFEYIRDNCPEYQCIWAVKKGYEMPFVEENVPFVKRLSWRWLWLMPRAQYWVFNTRMPAWMYKNQTTIYIQTWHGTPLKKLGLDIETVKMPEHETESYKLEVIQEAKRWDYLISPNAYSTRVFRQAFHYEGEILEIGYPKNDLLVCENKDKIAFSVRNQLGLAANKKIILYAPTWRDDESIRKGAYRFTNHLPVEQLLEIDSSIVILTRLHYLIAESFDISAFGSRVIDVSSYPDINQLYLIADLLITDYSSVMFDFALTKKPMLFFMYDKEKYQNSTRGFYFDPTAILPGKIVTDTDSLVTSVKNVLFSKTEQEQRLYVQFFREFCLENQDATRQLISEILKR

SEQ ID NO: 10837 - protein, 461 aa, Enterococcus faecalis
MKWPTSERLDSEEQMEKELKVRTKLLTKEYSLAQTRIDKLKTLFSVFQNKVPTFWALKGVSLDVYSGETIGIIGLNGSGKSTLSNIISGITPQTSGELEINGEVSIISIGAGLNNNLTGRENIRMKCLMLGEKNKEIDAKIDDIIEFSELGVFIDQPVKTYSSGMRAKLGFSIAVHQNPDILVIDEALSVGDQTFYNKGLKKMLAFKEQGKTIFFVSHSIQQVEQICDRVAWMHYGDLRAFGETKHILKEYRAFLHRYNHFTEPQKESYQRDGKAKQRNFSLEQLQETILEKANQQVGSRRTTKEVIKFTTKNKIGDKMTLGTKSLLILLLCMIFYVSLTFVKGISLTTAFIHPAETIQRIFVPEKVAGKDTNAVKTTKAKPASTKESSQQEEVQSSSTNASENNNGEQAVSTYTVEVGDSVSLIAENHGLTIEQLQTLNPEIIEVPIYPGQVLKLKEVTE

SEQ ID NO: 10838 - protein, 243 aa, Enterococcus faecalis
MENRGILFDKDGTCIRFDTLWQAGLQACFETLSMLAPHHSAEIKKILAIQEQRFLQKHLLDEVLYQELYQELAQFEELVEQGISSRWLEQFFYDYLRKNLKKIEPIGDLKQLFLELKRKNYKIGLATSDTLPATMLIMEYLGLTEMFDFIATGDRYLPKPDADMLQAFCQSCQLKATEVIMVGDSLVDVFMGTCHGKAGIGVLTGNCQSTDFENFEVAYFRDIHEIPYQELWENTKKKKIYYF

SEQ ID NO: 10839 - protein, 176 aa, Enterococcus faecalis
MLLTILVVGETAPSTTLGTMIVVSGAFLILMLLLKKYAWGAIVDILTQREEKIANDLDSAEQSRVAAAKMEKERQQQLLSSRSEAAEIIKNAKESGEQTRQKTLKETTAEVTRLREKARTDISQEREEALSSVKNEVADLSLQIAAKILNKELTPDAHEALIDSYIESLGKANETR

SEQ ID NO: 10840 - protein, 357 aa, Enterococcus faecalis
MCEIKEGSPMTIFTKERKLLLAVESSCDETSVAVIEDGDKILSNIVASQIKSHQRFGGVVPEVASRHHVEQVTICIEEALTEAKVTPEELSGVAVTYGPGLVGALLIGLSAAKAFAWAHQLPLIPVNHMAGHIYAARFVAPLEFPLMALLVSGGHTELVYMKEDGSFEIVGETRDDAAGEAYDKVGRVLGLPYPSGKEIDALAHEGTDTYQFPRAMLKEDNYDFSFSGLKSAFINTVHNAEQRGEVLSTKDLAASFQASVVEVLVAKTIRACQEYPVKQLLIAGGVAANQGLREAMRHAISEQLPAVTLLIPPLKLCGDNAAMIGAAAFIEAEKNHFASYNLNAEPGVSFMTISEEG

SEQ ID NO: 10841 - protein, 563 aa, Enterococcus faecalis
MNNKEIVAKALHDVLNEELTMDQIEQLLENPKSVDHGDVAFPAFSLAKIYRKAPQQIAAELAEKIDGTNFEKIEVVGPYLNFFMNKEAVSQAVIGAVVKEKNNYGNSTFGNNGNVPIDMSSPNIAKPISMGHLRSTVIGNSIAFILEKIGYQPIRINHLGDWGTQFGKLIVAYKKWGSEEAVRQQPINELLRLYVQFHEEAEEKPELEDEARAWFKKLEEGDQEANELWKWFRSESLKEFDKIYSMLEVEFDSYNGEAFYNDKMDEIVTLLEEKHLLTENQGAEIVDLTEYNLNPALIRKSDGATLYITRDLAAALYRKRTYDFAKSLYVVGNEQSNHFKQLKAVLKELGFEWSDDMEHIPFGLITQGGKKLSTRKGKIVLLEEVLNEAVTLAGNQINEKNPDLANREEVAKQVGVGAVIFHDLKNDRLNNFDFVLDEVVRFEGETGPYVQYTHARAMSILRKANFTPDATQRYALNDKDSWEVVKLLQKFPETVMQAAEKYEPSVIAKHSIHLAQAFNKYYAHVRILDEDAQKEARLALVYAVATVLKEDLRLLGLHAPEEM

SEQ ID NO: 10842 - protein, 275 aa, Enterococcus faecalis
MKNTAVTFKESKLRNEKLTMLTAYDYSTAKIIDEAGINGILVGDSLGMVCLGHEDTLSVTMEDMIHHTRAVTRGAKNTLVVADMPFMSYQTSVYDSVVNAGRLIKEGRAQVVKLEGGIEVCDKIEAIVKASIPVMAHIGLTPQSVNAFGGFKVQGKDKEAAKELIRAAKAVEKAGAFAVVLECVPTKLAELISKEISIPTIGIGAGAGCDGQILVYQDMLGMYSDFTPKFVKKYANLSEEMNKAFTKYIEEVKDGVFPGPEHGFKISDDVLEKLY

SEQ ID NO: 10843 - protein, 686 aa, Enterococcus faecalis
MKKINNRLGLFLFFVLLFWAKTILAYYLDFSLGVKGSLQREILWFNPVATTLLLFGFSLYFKKHKTFMLSLTLLNVLNTLILYLNIIFYREFTDFITIQSVFGFSKVLEGISGDLLALMRVHDVFYWLDTLVLLVLVFYSFKQRRNHQVFVTKPINRRLAISISCLSVLLFSVNLFLSETDRPQLLQRIFDRNYIVKYLGLDAFTAIDGVKTAMSNEVRAEASSNELPEIMKFTKQNNLPLNPQYAGIAKGKNVFVIHLESFQQFLINMKVQGQEVTPFLNQLYQNKATISFDNFFHEVGQGKTSDAENMLETGTFGLPQGSLFTQLGSDNTFEAAPAVLGQKGYTTAVFHGNVGSFWNRDHVYKNLGYQYFFDRSYFSKDDKMLGYGILDKQLLRESASELEHLQQPFYAKFLTVTNHTPYYTDDQNFPFPKLNTGNSIVDDYVRTAHYLDQSLEQFFHYLQTTSLYNHSIFVIYGDHFGISDANNKDLCKAFNRDPKTWTNYDNAQLQRVPLMFYMPGYTQGKIMHEYGGEIDVLPTLYHLLGVDDKNYIHFGTDLLSPQYKQVVPFRNGDFVTPRFSYLGGEIYNNQGKKLDQVPADLKAEVTKDNDWVKKSLSLSDKLNQENLLRFYKPQGFQEVQPKDYNYDVAFEKNKVLEVEKQKNAQSTSLFSQNGNQTTVQNYPTTP

SEQ ID NO: 10844 - protein, 343 aa, Enterococcus faecalis
MTINNTTFGGGTMLTLTAGKKAAMDRLSTQEGIISALAIDQRGALKKMIKALDVEPTDAQIETFKELVSKELTPYASAILLDPEYGLPAAKARDTEAGLLLAYEKTGYDATTPGRLPDLLADWSVLRLKEEGADAIKFLLYYDVDEDSEINHQKHVFIERLGSECAEEDLPFYLELVSYDAQIADATSLEYAKVKPHKVNEMMKEFSKPQYKVDVLKVEVPVNMNFVEGFAPAETAYTKEEAANYFLEQSQATDLPFIFLSAGVSTELFQETLRFAKEAGSTFNGVLCGRATWKNGVKPFVEAGETAACDWLKTEGRENIESLNEVIAATASSWHAKVQVNEG

SEQ ID NO: 10845 - protein, 345 aa, Enterococcus faecalis
MLKEFKMIEAVAPDMLDVLQERFQILRNIYWMQPIGRRSLSETMGITERVLRTETDVLKQLNLIEPSKSGMTLTERGLEVYQGLELVMNQLLGMHQIEKEMTQYFGIQRCIVVAGDSDIQKKVLSDFGDVLTNTLNLLLPNGENTIAVMGGTTMAMVAENMGSLETEKRHNLFVPARGGIGEAVSVQANSISAVMANKTGGNYRALYVPEQLSRETYNSLLQEPSIQEVLTLISHANCVVHSIGRALHMAARRKMSDDEMVMLKQKNAVAESFGYFFDEEGKVVYKIPRIGLQLKNLQEIPYVVAIAGGKTKAKAIRAYMKNAPKQTWLITDEAAANEILKGVTL

SEQ ID NO: 10846 - protein, 261 aa, Enterococcus faecalis
MFKGVFLMPKEFETKRVLVTGAASGIGQAQAIAFAEQGAEVIGIDLDETGLKQTAALVNPDSTKPFTYFVGDVSSPSFVQATMKQIVKDNGQIDILLNTAGILDDYRPSLETSEALWDQILATNLKSVFLVTNALLPYFLQQKKGVIVNMASIAGLVAGGGGAAYTASKHAIIGYTKQLSYDYAKLGIRANAIAPGAIQTPMNAADFAGEGEMATWVASETPAGRWAQPQEVAKLSLFLASDDADYIHGTVMTIDGGWTMK

SEQ ID NO: 10847 - protein, 333 aa, Enterococcus faecalis
MTVKVGINGFGRIGRLAFRRIQDVEGIEVVAINDLTDAKMLAHLLKYDTTQGRFNGTVEVHEGSFNVNGKKIKVLANRNPEELPWGELGVDIVLECTGFFTSKEAAEKHLTAGAKRVVISAPGGNDVPTIVYNTNHETLTGEETVISGASCTTNCLAPMAKALHDNFGVVEGLMTTIHAYTGDQMTLDGPHPKGDFRRARAAAANIVPNSTGAAKAIGLVIPELNGKLDGAAQRVPVATGSLTELVTVLDKEVTVDEVNAVMEKAANESYGYNTDEIVSSDIVGMTYGSLFDATQTKVMTVGDKQLVKTVAWYDNEMSYTAQLVRTLEYFANL

SEQ ID NO: 10848 - protein, 845 aa, Enterococcus faecalis; identical to SEQ ID NO: 4972

SEQ ID NO: 10849 - protein, 290 aa, Enterococcus faecalis
MEQRGKFISFLCIALIVAVVVSIFYFVASKGLATFFKDKINVFDFLFGTNWNPSDIGADGKPMVGALPMIAGSFIVTFLSAIVATPFAIGAAVFMTEISPKKGAKFLQPVIELLVGIPSVVYGFIGLSVIVPFVRSIFGGTGFGILAGTFVLFVMILPTVTTMTVDALKAVPRHYREASLALGATRWQTIYKVVLRAAVPGILTAVVFGMARAFGEALAIQMVIGNAAVMPTSLTTPASTLTSILTMGIGNTIMGTVENNVLWSLALILLLMSLLFNIVIRIIGKRGALK

SEQ ID NO: 10850 - protein, 397 aa, Enterococcus faecalis
MAKKTIKDVDLKDKKVLVRVDFNVPLKDGVITNDNRIVAALPTIKYVIENGGKAILFSHLGRVKTEEDKAGKSLKPVAERLSELLGQPVTFVPETRGKELEDAVNNMKDGDVLVFENTRFEDVDGKKESGNDAELGKYWASLGDVFVNDAFGTAHRAHASNVGIASTGIPTVAGFLMEKEIKFIGEAVENPKRPFVAILGGAKVSDKIAVIENLIEKADKILIGGGMAYTFMKAQGYSVGLSLLEEDKVDLAKSLMEKAGDKLVLPVDTVVSKEFSNDAPFHTVPSTEIPDDEEGLDIGEKTIELFANELQGAKTVVWNGPMGVFEMSNFAKGTIGVCEAIANLEDATTIIGGGDSAAAAIQLGYENKFSHISTGGGASLELLEGKTLPGLASINDK

SEQ ID NO: 10851 - protein, 311 aa, Enterococcus faecalis
MTEVVKIYQLVENLSLEVVYGDEESLNRTIKTGEISRPGLELTGYFNYYSHDRLQLFGSKEITFAERMMPEERLLVMRRLCAKDTPAFIVSRGLEIPEELITAAKENGVSVLRSPISTSRLLGELSSYLDGRLAVRTSVHGVLVDVYGLGVLIQGDSGIGKSETALELIKRGHRLIADDRVDVYQQDELTVVGEPPKILQHLIEIRGIGIIDVMNLFGASAVRGFMQVQLVVYLEAWEKDKKYDRLGSDDAMVEIANVDVPQIRIPVKTGRNVAIIIEVAAMNFRAKTMGYDATKTFEERLTRLIEENSGE

SEQ ID NO: 10852 - protein, 340 aa, Enterococcus faecalis
MKQKVAVLGPGSWGTALAQVLAENGHEVCIWGNKPEQIDEINTKHTNKHYLPELILPTSIQATTDLATALVDVDAVLFVVPTKAIRSVAQEVAQHLKTKPIIIHASKGLEQGTHKRISEVIAEEIPAEKRQGIVVLSGPSHAEEVAVHDITTITAASENLADAVYVQELFMNDYFRIYTNDDVIGVETGAALKNIIALGAGAIHGLGFGDNAKAAIMTRGLAEISRLGVAMGANPLTFIGLSGVGDLIVTCTSVHSRNWRAGNLLGKGHKLDEVLENMGMIVEGVSTTKAAYELAQQLEVEMPITETIYNVLYNDEDVQQAAKEIMLRDGKTENEFTLDF

SEQ ID NO: 10853 - protein, 254 aa, Enterococcus faecalis
MLFMRKPIIAGNWKMNKTLSEAQSFAEAVKNAVPSNDVVDAVIGSPALFLAPLAWNLKDSEVKLAAQNCYWENAGAFTGENSPAAIADLGVNYVIIGHSERREYFHETDEDINKKAKAIFANGMIPIFCCGETLETYEAGKTAEWIEGQITNGLVGLSNEQVASMVIAYEPIWAIGTGKSADANIADEICGVVRSTVEKLYGKEVSEAVRIQYGGSVKPENIAEYMAKENVDGALVGGASLEADSFLALLDAVK

SEQ ID NO: 10854 - protein, 432 aa, Enterococcus faecalis [sequence omitted]

SEQ ID NO: 10855 - protein, 297 aa, Enterococcus faecalis
MLLGSHVSMSGKKMLLGSAEEAASYGSTTFMIYTGAPQNTRRKPIEEMNIEAGQAFMKEHNLSNIVVHAPYIINLGNTIKTENFGFAVDFLRQEIERAQALGATQITLHPGAHVGAGPEAGIKQIVKGLNEVLWKEQIPQIALETMAGKGTEIGRTFDELAAIIDGVTLNDKLSVTLDTCHINDAGYNVKDDFDGVLVEFDKIIGLDRLKVIHVNDSKNPMGSHKDRHANIGFGTIGFEALNGVVHHEKLTALPKILETPYVGEDKKNKKAPYGFEIAMLKNQTFDPELLEKIQGQN

SEQ ID NO: 10856 - protein, 266 aa, Enterococcus faecalis
MKREKQTRKLGGTVKPVIVKNVRIGEGNPKIVVPIVAPTAEDILAEATASQTLDCDLVEWRLDYYENVADFSDVCNLSQQVMERLGQKPLLLTFRTQKEGGEMAFSEENYFALYHELVKKGALDLLDIELFANPLAADTLIHEAKKMGIKIVLCNHDFQKTPSQEEIVARLRQMQMRQADICKIAVMPQDATDVLTLLSATNEMYTHYASVPIVTMSMGQLGMISRVTGQLFGSALTFGSAQQASAPGQLSVQVLRNYLKTFEQNK

SEQ ID NO: 10857 - protein, 310 aa, Enterococcus faecalis
MKKQQRKAKMEQINVTIQTEKGRIDKVLSEHLPNHSRSQIQQWLKEKHVTVNGETVRANYKVTAGDEIVVTIPEPEALDMVAEDIPLTIVYEDNDVIVVNKPQGMVVHPSAGHPKGTLVNALLHHADHLSAINDVVRPGIVHRIDKDTSGLLMVAKNDQAHESLAKQLKEKTSLRKYVALVHGVIPHDKGEINAPIGRSKVDRKMQAVIEGGKEAVTHFTVLERFDAFTLVELQLETGRTHQIRVHMKYIGYPLAGDPLYGPKKTLPGNGQFLHAKLLGFTHPTTGEQLVFEAPLPEVFEKTLHQLRNNH

SEQ ID NO: 10858 - protein, 427 aa, Enterococcus faecalis
MKTLIKNGKIIKKENQLIEAALWLENGVIHAIGESFDEADFEQVFDAKGQLITPGLVDVHVHFREPGFTYKETIKTGSKAAARGGFTTVCAMPNLNPVPDTAEKLSEVYDLIQKDAVVKVLQYAPITEELRSEVLTNQKALKEAGAFAFTNDGVGVQTAGTMYLAMKEAAALNMALVAHTEDESLLFGGVMHEGEVSKKLGLPGILSATEASQIARDITLAKETGVHYHVCHVSTEESVRVIRDAKKAGIHVTAEVSPHHLILVDEDIPGDEGFWKMNPPLRGLADRQALIDGLLDGTIDCIATDHAPHGLEEKQQSFLNAPFGIVGSETAFQLIYTNFVETGIFTLEQVIDWMAVKPAEIFGLNAGTLTIGAPADIAVFDLATAAPIDAEAFESMAVNTPFTGWTVKGKTLMTFVDGALAWSEEAQ

SEQ ID NO: 10859 - protein, 257 aa, Enterococcus faecalis
MTNNGSLRRNMLAKSGPHISLLADLLPKQKILMKPIKKSKKTGAESNMTKVAKKIAKDLLDIEAVFLNPNEPFTWASGIKSPIYCDNRITMSYPAVRKEIAEGLAAKIKETFPEVEVIAGTATAGIPHAAWVADILGLPMVYIRSKAKDHGKGNQIEGRISEGQKMVVIEDLISTGGSVLEAAEAAEREGATVLGVAAIFTYELPKGTANFADKQMTLLTLTNYSTLIDAALEANYIEEKDVTLLQEWKKDPENWGK

SEQ ID NO: 10860 - protein, 127 aa, Enterococcus faecalis
MKSVTYKGLKMGARLMEMEKTNRMNALFEFYSTLLTEKQMNYMELYYADDFSLGEIAEEYEVSRQAVYDNIKRTEKILEEYEKKLHLYSNYVVRKEYLEQLQQYVQETYPKDSEIKKYIEQIQEIEE

SEQ ID NO: 10861 - protein, 477 aa, Enterococcus faecalis
MAFESLTNRLQQAMSKIRRKGKVSEADVKEMMREIRLALLEADVNLQVVKDFTKRVRERAVGVEVLESLSPAQQIVKIVDEELTKTLGSETVELNKSPKIPTVIMMTGLQGAGKTTFTGKLAKHLMKTENARPLLIAGDVYRPAAIDQLKVLGQQLEVPVFDMGTDANPVEIVRQGLALAKEKKNDYVLIDTAGRLHIDEALMDELKQIKELANPNEILLVVDAMTGQDAVNVADSFNEQLGITGVVITKMDGDTRGGAALSIRAVTGAPIKFVGSGEKLTDLEIFHPDRMSSRILGMGDMLTLIEKAQQDYDEKKAEELAQKMKENSFDFNDFIEQLDQVMGMGPIEDLLKMIPGMSNMPGIENVKVDPKDVARKRAMVLSMTPAERENPDLLNPSRRRRIAAGSGNSVVEVNRMIKQFKESKKMMQQMSKGDMNIPGMDQMLGGGVKGKLGKMAMNRMMKKNKKKKKKKRLTGFS

SEQ ID NO: 10862 - protein, 82 aa, Enterococcus faecalis
MGSKKKSFYRIVSAESRSSREGRFIETVGTYNPLEDPAQIDLKEDLVLDWLSKGAQPSDTVRNILSKEGVMKKHHEAKNVKK

SEQ ID NO: 10863 - protein, 81 aa, Enterococcus faecalis
MADVKELILTIVRPLVSQPEAVSLEIEESTDFLEYNLTVAKEDIGRIIGKQGRVAKAIRTIVYSVRIDGPKKVRLNILDGK

SEQ ID NO: 10864 - protein, 618 aa, Enterococcus faecalis
MKQLATLWLKGVDVIVTDHHELPEQLPEAFAIVHPRHPQGDYPFGDLAGVGVAFKVATALLGELPIELLDLVAIGTIADLVSLTDENRTFVKMGLQMIQTGDRIGLDVLLQEAGVKKEAVSEESIGFTIGPRLNALGRLGEAAPGVELMTTFDEEQALEIAKYIDQQNNERKDIVTTIAKEALDLIDPNAPVHILAKQGWHEGVLGIVAGRIMQETGKPTIILAIDESGTTAKGSGRSISALNLYEALNEVREQFTHFGGHHMAAGMTLPVENIPFVQEHLSHFIEKNQIDMANGQELLISESLAVSQATTTFIDQLRILAPFGTDNTVPTFVFKEITPTQIRKIGADNAHLKFQMNQEGAQLDAIAFQMGPQADELAQGTADVAGQLSINEWNGRKKPQLMVTDFAVSGRQLFDFRGKNNQTKPIPSEATAYLLFDEKNQKFISDPTANIIVWSNQEELVEAVSQNQIEQLVFVDCPVEAITVKEIVEATEIQRIYMMFISPEEAYLNGMASREQFATLYKFILQQKEVNLRSQLSKVANYLNIQEKLLIFMIQVFFDLGFVTIESGVLNSIEKPDNRPLTESQVYQQRLKKIKTEEFLLYSDCQTIQQWLWNEEDK

SEQ ID NO: 10865 - protein, 284 aa, Enterococcus faecalis
MSLRVESVSKKYHQKKALDNISITFEKETIYGLLGRNGAGKSTLLNIINNRSFATSGSVQLAGETVTDNETALNHIYLMSEDNLFPPQLKIKDIFKTTEGFYGSFDWSLAEQMLSDFGLDSKKTFKKLSTGYRSIAKLIVALSVPCEYIFLDEPVLGLDANHRELFYTYLIETYQERPRTFVISTHLIEEIANLLEDIIIIDQGKLIRAESIETILKNGRIVSGPKEQVERYTQSLEILGMDTLGGAVTAYVYGDLPTEKAEVQIAPLNLQTYFVQLTNRKKEK

SEQ ID NO: 10866 - protein, 501 aa, Enterococcus faecalis
MAEEKYIMAIDQGTTSSRAIIFDKKGNKIGSSQKEFTQYFPNAGWVEHNANEIWNSVQSVIAGSLIESGVKPTDIAGIGITNQRETTVVWDKATGLPIYNAIVWQSRQTTPIADQLKEDGYSEMIHEKTGLIIDAYFSATKVRWILDHVEGAQERAENGELMFGTIDTWLVWKLTGDTHVTDYSNASRTMLFNIHDLDWDQEILNLLNIPRVMLPKVVSNSEVYGLTKNYHFYGSEVPIAGMAGDQQAALFGQMAFEPGMVKNTYGTGSFIVMNTGEEPQLSKNNLLTTIGYGINGKVYYALEGSIFVAGSAIQWLRDGLKMLQTAAESEAVAKASTGHNEVYVVPAFTGLGAPYWDSQARGAVFGLTRGTTREDFVKATLQAVAYQVRDIIDTMKEDTGIDIPVLKVDGGAANNDFLMQFQADILNTAVQRAHNLETTALGAAFLAGLAVGFWKDLEEIKAFQEEGQQFEPIMAEEEREDLYEGWQQAVAATQQFKRKNK

SEQ ID NO: 10867 - protein, 158 aa, Enterococcus faecalis
MKIRVADEKELPMILQFLTEVKAYMDVVGITQWTKDYPSQGDIQEDITKKRLYLLVHEEMIFSMATLCMEQEQDFVWLKRFATSPNYIAKGYGSLLFHELEKRAVWEGRRKMYAQTNHTNHRMIRFFESKGFTKIHESLQMNRLDFGSFYLYVKELEN

SEQ ID NO: 10868 - protein, 274 aa, Enterococcus faecalis
MAILAFDLGGSSVKYGVWTGKELTNQGSFPTPGSWEEMKAHLYSVYADKRNESISGVAFSSPGVVDEKSQQILGISAIPYIHHFNIYEELEALFGLPVTIENDANCAGLAEIYEGAAKGKKEVLFVVIGTGIGGAIFRNGELYKGAHLYGGEFGLNFLSNGQTFSEIGTAVKMAQRYCERIGVEKQAVTGEEVFELAQRGDEIAREEVNNFYDYLTQGLFGLQFSYDPEMIVLRGGVSAKEGLLAEINRRMLTHLQTFELKRFCSRNRDLPLSK

SEQ ID NO: 10869 - protein, 330 aa, Enterococcus faecalis
MKNYYFLRGVCMKIGLQTVKTAISAALAMIIAEKLGLLYAPSAGIISVLSVTSTKKTSVMTGIYRLLSLALATILAYICFTFLGFTAIAFGIFLLLFIPAAVYFQLSDGIVVSSVLVTHYLVEKNLSWAIIGNEFLLMSIGVGLALLANSYMPDTEKRLREDQEVIETMFRKILREMALHLNNAAGERNLVMHCADLKTFIRTGETWAKNHAENQLLSTNTYYLEYFAMRKMQSNILKNMLELLEDITVDAQQVRYIQQLLEYTAETFAENNDGQEIMNRIKTVYETYRTKPLPQTRSEFENRARLFQFLQLFQSFIQVKADFAKLQLDK

SEQ ID NO: 10870 - protein, 456 aa, Enterococcus faecalis
MFYIVTEKRIIMGNQENKLYHFVGIKGSGMSSLALVLHQKGYNVQGSDVEEYFFTQRDLEKSGVPILPFNADNIDKDMIVIAGNAFPDTHEEIARAIELGAEVIRYHDFIARFIEPYTSIAVTGSHGKTSTTGLLAHVLSGINPTSYLIGDGTGHGEPDADFFAFEACEYRRHFLAYSPDYAIMTNIDFDHPDYYKSIEDVFSAFQTMAHQVKKGIFAYGDDKYLRQLESEVPVYYYGVSEEDDIQARNIQRTTEGSSFDVYHKADFVGHFVLPAFGHHNIMNALGVIAVAYFEKLDMQKVAEEMLSFKGVKRRFSEKKVSDMIIVDDYAHHPAEIKATIDGARQKYPDKEIIAVFQPHTFTRTIALMDEFAEALDLADEVFLCNIFGSARETQGEVRIEDLGEKIQKGGQVITEDNVSPLLDFENAEVVFMGAGDVQKFEQAYETLLSNTTRNVL

SEQ ID NO: 10871 - protein, 250 aa, Enterococcus faecalis
MQRYFMKEDYQEKDLYKVADENYHHIVRVMRMTPNDRCYLVFQNKTAILAEIVEIDSTSVYFKEISKEEMDKELPIEVTIACGLPKGDKLEWIVQKGTELGGNQFIGFPAKTSVVKWDHKKRAAKEKRLQKIATEAAEQSHRQQTPSVSLVEKTQEIIAQFDSYDTVLVAYEESAKQGEKSQLAQVLSTCQPGARLCVLFGPEGGFAPQEIEQFLQAGAKLCGLGPRILRAETAPLYLLSAVSYQMELLN

SEQ ID NO: 10872 - protein, 453 aa, Enterococcus faecalis
MKEKKTEKMLNYANGPSLEEINNTVEVPKNASFWRTLLAYSGPGALVAVGYMDPGNWITSIAGGAEYKYTLLSVILLSSLVAMLLQSMAARLGIVTGMDLAQATREHTSKRTGVALWVVTELAIMATDIAKVIGGAVALQLLFGFPLLIGVLITTFDVLLLLLLTKLGFRKIEAIVSCLIAVIFFVFAYEVALADPNVGEVLRGFIPDTKIATDKSMLFLALGIVGATVMPHNLYLHSSIAQARKFDRNDDAEKAKAIRFTTWDSNIQLTVAFVVNCLLLILGGALFYGTNSELGKFVDLFDALKNPDIVGNIASPVLSILFAIALLASGQNSTITGTLSGQIVMEGFIHLKMPLWARRVLTRLLAIVPVIICVIIYGGSETAVEDLLLYTQVFLSIALPVSIIPLTMYTSDKKLMGQFANPAWVKFLAWIIAIALTLLNLFLIYGTLTGLTN

SEQ ID NO: 10873 - protein, 34 aa, Enterococcus faecalis
MGESIIGKAREKQLLELNVSNFRDFSDNKHQTGR

SEQ ID NO: 10874 - protein, 213 aa, Enterococcus faecalis
MSLIFAIFQITNTKPVDDYPYGGCAGMLLKVQPIYDNLKAIEEETNQQPKRVILLDPAGKPFNQKMAEEFSQEEHLVFICGHYEGYDERIRTMVTDEVSLGDYVLTGGELGAMVMIDATVRLLPDVLGNNLSAQTDSHSTGLLEHPQYTRPAIFNDMEVPAVLTNGNHKLIAEWQLKESLRRTFLRRPDMLESVEMTPEMLKLLEEIKQEEQK

SEQ ID NO: 10875 - protein, 131 aa, Enterococcus faecalis
MAEVTIRIFGNKEKDKMNPLIQELTQEQLRTDIPAFRPGDTVRVHAKVVEGTRERIQLFEGVVIKRRGAGISETYTVRKVSNGVGVERTFPLHTPRVAQIEVVRYGKVRRAKLYYLRALHGKAARIKEIRR

SEQ ID NO: 10876 - protein, 740 aa, Enterococcus faecalis
MNTMPKEEILTGPAVIKIVSTYMGPEHVELVQKALTYAEKAHEGQVRQSGEPYIIHPIQVAGILAELHMDPHTVATGFLHDVVEDTDVTLDDLKEEFGEDIAMLVDGVTKLGKIKYKSHEEQLAENHRKMLLAMAQDLRVIMVKLADRLHNMRTLKHLREDKQRRIAQETLEIYAPLAHRLGISRIKWELEDTALRYINPNQYYRIVNLMQSKRDEREAYVAEAVEDIRLATEDLEIYAEIYGRPKHIYSIYRKMKDQKKQFNEIYDLLAIRVIVDSIKDCYAVLGAIHTRWTPMPGRFKDYIAMPKANMYQSIHTTVIGPKGNPVEVQIRTHEMHQIAEFGVAAHWAYKEGKAEKIETDELTKQVDWFHEIIELQDESYDASEFMQGVKEDIFSDKVYVFTPSGDVTELPKGSGPLDFAYSIHTEIGNKTTGAKVNGKMVQLDYVLKNGDIIEVLTSPNSFGPSRDWLKMVKTSKAKNKIKRFFKEQDREDNIIKGHDAVIKYMTEIGFTPKEFLTKNKMAEVLDKFKFQTEDDLFAAVGYGEVSAQVVCNRLTEKERREQELERQRQEAEELLNQPAKKESEKMKVRHEGGIVIQGVDNLLIRLSRCCNPVPGDEIVGYITKGRGVSIHRADCPNVQHREELAQRLIEDECPDTEHSRKEYAADLEIYGYDRSGLLSDVLQVISSMTKNLVGVEARPSKDKMAQIHVTVKIQNLSHLKTIVDKIKSVPDVYSVRRTNG

SEQ ID NO: 10877 - protein, 433 aa, Enterococcus faecalis
MSYQKPKGTNDILPGTSEKWQFVEETARLIFKDYQYQEIRTPIFEHYEVISRSVGDTTDIVSKEMYDFYDKGDRHVTLRPEGTAPIVRAFVENKLYGPEYTKPYKTYYMGPMFRYERPQAGRLRQFHQIGVEAFGSENPALDVEIMAMALDFFKQLGIQQIKLVINSLGDKETRATYRQALIDYLEPHMAELSEDSQRRLHENPLRVLDSKDKKDKVIVAEAPSILDYLNEPSKAHFEAVTDMLDLLEIPYEIDSNMVRGLDYYTHTIFEIMSEAPKMGAQSTICAGGRYNGLVEELGGPDTPGFGFGMGIERVLLTMEAEEVVIPALSELDAYVVGIGSETNITALQLVQSIRNFGFSADRDYMNRKPKAQFKTADKLQAKLVLTIGENELNEGIVNVKSMATREEKAFPLSAIHDSFDEVYDEMMTKMIEE

SEQ ID NO: 10878 - protein, 589 aa, Enterococcus faecalis
MAKRTTYCGNVSAEFIEKEVVLKGWVQKRRDLGGVIFIDLRDREGIVQVVFNPEKSKEAWEIADKCRSEYVIEVKGQVVYRDKEAINPKMKTGEFEVMATDITILNTAKTTPFTIEDDNNVNDELRMKYRYLDLRRPSMTNNIKLRHQVTKTIRHYLDNHDFLDIETPYLGKSTPEGARDYLVPSRVHAGHFYALPQSPQLFKQLLMGAGFDRYYQIVRCFRDEDLRGDRQPEFTQIDIETTFLTPEEIQTYTENMLAEVMKETKGIEISVPFPRMSYDEAMARYGSDKPDTRFAMELIDVADVVKDVDFKVFQAALENGGHVKALNAKGAADKYSRKDMDNLGKYVSQFGAKGLAWLKVEEDGLKGPIAKFLTEVSDELIAATNAEVGDILMFGADKPEIVAAALGAVRTRLGKELGLIDESKFNFLWIVDWPLFEYDEEAGRYVSAHHPFTQPKAEDVARLATDPASVYAEAYDVVLNGYELGGGSLRIHTRELQEKMFETLGFTKEEAQDQFGFLLDALDYGFPPHGGIALGLDRLAMLLAGEENIREVIAFPKNGKAIDPMNNAPSLVSPLQLFELNIDVTAIDE

SEQ ID NO: 10879 - protein, 203 aa, Enterococcus faecalis
MSRYTGPSWKVSRRLGISLSGTGKELARRPYKPGQHGPNSRGKVSEYGMQLTEKQKLRHMYGMNERQFRTLFIKASKIKEGKHGVNFMVLLEQRLDNVVYRLGLATTRRQARQLVNHGHITVDGKRVDIPSYHVEVGQVIGVREKSQNISTIKEAVEATVGRPAFVSFDTEKLEGSFTRLPERDELYPEIDEALVVEYYNQKL

SEQ ID NO: 10880 - protein, 249 aa, Enterococcus faecalis
MNLFSNSFSRYAVRAMLACLFLTLGTAVAFAIAIKGEGISHGLGKMLYAFMFSWSLVMILYMNAELGTSNMLYMTVGVYRKKVNFSLAAKILFTCILFNLIGGVLFGFLVSLTVPFQDLPKDSFFFTSIAGKLEKTTLQILVEAMFANIVVNTAVLVSMRMKDDAGKVAAIIFIIFIFAFLGFEHVIANFPAFSLAYFASNGAIEAFTAGNVVHNLFWAFIGNFIGGGLIMGLGYAWLDKDNKNLTYFD

SEQ ID NO: 10881 - protein, 101 aa, Enterococcus faecalis
MIRRIIEKEVEQMAISQERKNEIIKEYARHEGDTGSPEVQIAVLTEDINQLNEHARTHKKDHHSYRGLMKKIGHRRNLLAYLRKTDIQRYRELIQRLGLRR

SEQ ID NO: 10882 - protein, 704 aa, Enterococcus faecalis
MTEKQVFKTTWGGRPLEVEIGQLAKQANGAVLVRYGDTVVLSAAVASKEAKDVDFFPLTVNYEEKMYAVGKIPGGFIKREGRPSERATLTARLIDRPIRPMFSEGFRNEVQITNIVMSVEQDCTPEMAAMFGSSLALAISDIPFDGPIAGVDVGRINGEYVLNPTVEQAEQTDIELTVAGTKEAINMVESGAKEVSEEDMLGALLFGFDAIKELVAFQEEIVAAVGKPKMDVDLLQVDADLKKEIFDAYYNTMKTAVMTEEKLAREVEIDKVKDTVKEVYAEKFAEHEEEAQLLKEVKQIAEDLEKDVVRELITIDKIRPDGRKLDEIRHLSSEVSILPRVHGSGLFTRGQTQALSVCTLAPLGEHQIIDGLGVQDSKRFIHHYNFPQFSVGSTGRAGSPGRREIGHGALGERALAQIIPSEEDFPYTIRLVAEVLESNGSSSQASICAGTLALMDAGVPIKAPVAGIAMGLVSDGENYTILTDIQGLEDHLGDMDFKVAGTKDGITALQMDIKIQGITEQILTEALDQAKKARMEILEELTTTIAAPREELSQYAPKIEMIQIKPAKIKDVIGKGGETINSIIDETGVKIDIDQDGNVSIASSDAEMIKKAIKIIEELTKEVEVGQVYLAKVVRIEKFGAFVNLIKGKDGLIHISQLANERVNNVEDVVKLGDEVLVKVTEIDKQGRVNVSRKALLNEENKEK

SEQ ID NO: 10883 - protein, 244 aa, Enterococcus faecalis
MRPKEKKRGKNWLINSLLVLLFIIGLALIFNNQIRSWVVQQNSRSYAVSKLKPADVKKNMARETTFDFDSVESLSTEAVMKAQFENKNLPVIGAIAIPSVEINLPIFKGLSNVALLTGAGTMKEDQVMGKNNYALASHRTEDGVSLFSPLERTKKDELIYITDLSTVYTYKITSVEKIEPTRVELIDDVPGQNMITLITCGDLQATTRIAVQGTLAATTPIKDANDDMLKAFQLEQKTLADWVA

SEQ ID NO: 10884 - protein, 226 aa, Enterococcus faecalis
MHKGSIFDKIRQENDRGGTEMIFAYNKEHVGDVLLVIVADDQGAENQVKRVGDVARVSLVEAPETVVAWNIFNASALLGDINGTGQVTLTDEQIEKVNTAIKDAGFSEILEKDDTPKIVVGFVKSCKKHPDSDHLSITQTEVDNGEILQIVCGAPNIKAGQKVVVAKPGAMMPDGLMIWPGVLRGEESFGMICSAKELRLPNAPAKKGILELPFDAEVGSAFAVGE

SEQ ID NO: 10885 - protein, 355 aa, Enterococcus faecalis
MCTGIKIISKTNDIFYGRTMDFTFDFFGNEDPIAPKIPTLIAQFPKGTVLNSQLNPWTAKYSFMGLAMSGTDQPANDGKTVSLAITDGINEAGLSGDIQYLMESSTAPAESLAERGLTPHIAEEVLAYILSNFESVDEVKVAFEKIGLLDQKFQLDSLGEVHFTLHWTINDKNNNSIVLQPTDNGAFVIYDSIGVVTNSPEYNYHLTNARNYIGMRNYAIKEPYTLKSGATLDPIEGGTSYGLLGIPGDFTSPSRFIRALYYSDNLQEFDSSEGIMQLYRAFQTVMIPRGIGHLGQSNSLSDFTHYWSGYDVTNLTMYVQPESTTSFTKYTLDPALTEVTTFAVSNELLLTDLNQ

SEQ ID NO: 10886 - protein, 170 aa, Enterococcus faecalis
MGEIKQLTIEDAPALQEISIETYTDTFGPYNTPENMQAYLVEAYNLEKLQKELANPHSDFYFIFVDNQLAGYMKLNRETAQTEPMGPEKLEVERLYILPAFKGKKLGTQLLELAEEKAREFGKNALWLGVWEHNDAARAFYKTIGYRYYSQHSFFMGDDEQTDFILLKEL

SEQ ID NO: 10887 - protein, 128 aa, Enterococcus faecalis
MKKLDLSTEEISAIFRFKEKIVDKNTSCRYILNQSLLLRRGKMTEEKKKVLNRLRRTEGQIRGIQKMIDEEKECIDVITQLSAVRSSIDRVMGMIVAENLKHCFENPEKDPKEQEERLAQAINMIVKK

SEQ ID NO: 10888 - protein, 481 aa, Enterococcus faecalis
MGRYEGGNKEMKKRALLGVTLLTFTTLAGCTNLSEQKSGEKQTEVAEAKATESEKASVKNVIFMIGDGMGNPYTTGYRYFKANHSDKRVPQTAFDTYLVGQQATYPEDEEENVTDSASAATAMAAGVKTYNNAIALDNDKSKTETVLERAKKVGKSTGLVATSEITHATPAAYGAHNVSRKNMAEIADDYFDDQIDGQHKVDVLLGGGSELFARKDRDLVKEFSQAGYGHVTDKKSLNENQDDKILGLFAPGGLPKMIDRTEEVPSLADMTEAALQRLDKNEKGFFLMVEGSQIDWAGHSNDIVGAMSEMQDFEAAFEKAIDFAKKDGETLVVTTADHSTGGLSLGKGDQYNWLTEPLHAAKRTPDFMAEEIIKNGNVEKTVTEYIDFQLSEAELKAVKTASESKDVEKIAQALRKIFDERSNTGWTTGGHTGEDVNVYAYGPQAEAFSGQIDNTDQAKIIFGLVDGTGQKAEIKDKGIGK

SEQ ID NO: 10889 - protein, 669 aa, Enterococcus faecalis
MNYKISYLLDEYAGQKIALSLAQQITDLSQRELVTQLSTIGGVVQQNTVSIPNLSANEWGKQLFQQRQVIYSETERQALIFLLTYSEIEELSVYHYQNFLDVSKGTILADIKKVRHQLATENIALSYERKRGFYLEGDEFRIRRFGKNWLARLLQQKSGTFALFCWLSQHQMSQYAKMRDGIQLAVQEAQLQLVPSRLDEISYFLAFSQKRLGKYKTVVWPENQLIQSLRAYPVSRRILSDLVGPVANVETESLFFTICLMTALQGELRDTKLEFLLDISGEIIRKMELLAVVQFEQPRELLMNVYYHLVPAYFRINYGFYLPNVLIKDIRQSYRSLYHLCEQALDPLEKLTKRSIPSEEIGFFTILFGGEIFGQKNEQRQEKLKALIVCPSGISSSLILQSELRRLFPMIEFKETNAVREIENVSEKSYDIIFSTVPIETAKKVYFTKPIMSSLEKNQLMHQVQSDWLLPGISMPDVKDILDALKPYISLKKGVTEAQLYRVLHRKMNKILEKEEDLRPMLSELLTTETVQVLPEVADWRAGITEAAKPLLKNGSITEKYIDAMIQKVESFGPFIHICPDVALPHARPEDGVNQLGMSLLKIQKSVDLLEDPKHEIHLFICLAASDNETHLRALSSLTKILSKKESLHRLVAAETVPEILSIIQEGEK

SEQ ID NO: 10890 - protein, 455 aa, Enterococcus faecalis
METLLNLFVSIVSQPAILVSLIALLGLVLQKKKFSDVVQGTLKTFVGFLVLIGGAGLLANSLTPFAEMFQTALNTQGVVPSNEAVVAIALQQYGTPTALIMLVGMVVNILLARFTRFKYIFLTGQAMMYVSCLTAVILVGAGFSVSLPMILLGGLFEGTLLTVTPALCQPFMKQITGNDKVAMGHTGNIGYAASGFIGKVFGNKEKSTEDIKIPKSFGFLRDSTISIMILMSIVYVILALLAGTGYVEHELSNGENAIIFSLIQAGTFTAGFVVVLQGVRMVLGEIVPAFQGIAKKLVPNSKPALDVPIIFPYAPNAVLIGFFVSFIVGTISMLAMVGLNTTVIIPGVVGHFFCGAAAGVFGNSTGGRRGAILGAAFNGLLISWLPLFILPVLGDLQLASSTFADTDYLIPGLFLGKLGEAGPSLLVGGIIAFVVVVLLASAVLTMREKKVAEEN

SEQ ID NO: 10891 - protein, 518 aa, Enterococcus faecalis
MVLNILLAIVGLIVGLGLGFVIAKSRHDKAINGAKISASSILENARKESETLKKEALLEAKEENQKYRSEIESELKESRLELKSQENRLIQREQTLDRKDDSLEKREGSLEEKEEKLGARQQLIDEREKEVENLINQQHQELERIASLSKEEAKSIIMKSTEEELNHELTLMVKESEQRAKEESDRKAKNLLSLAIQRCAADSVSETTVSVVTLPNDEMKGRIIGREGRNIRTLETLTGIDLIIDDTPEAVVLSGFDPIRREIARMTLEKLIQDGRIHPARIEEMVEKSRKEMDERIREYGEQAAFEVGAHTLHPDLIKILGRLRFRTSYGQNVLNHSIEVAKLAGVLAAELGEDVQLAKRAGLLHDIGKALDHEIEGSHVEIGAELAAKYKENSVVINAIASHHGDVEATSVISVLVAAADALSAARPGARSESLENYIRRLENLENISNSFEGVDSSFAVQAGREVRVMVKPEEISDLESVRLVRDIRKKIEDDLDYPGHIKVTVIRETRAVDYAK

SEQ ID NO: 10892 - protein, 305 aa, Enterococcus faecalis
MKMNAVTIIGSINLDTTLRVKEMPKPGETIHAIEHFTAGGGKGANQAVAAKRSGAETYFIGAVGNDGAGAMMTDLMSQDEINLTGVTTLEKTATGQAFIMVDNAGENSIMIYAGANNAFTPKQVQEHQEIIEKSDFVIAQFESAIDSTIAAFKIAKKAGVKTILNPAPALEQVPEELLNVTDMIVPNETETEILTGIKITDEASMRKAAEALHQLGIEAVIITVGSKGAFYDVNGRSGIVPAFKVKAVDTTAAGDTFIGALSSILEKDFSNLEEAIRYGNKASSLTVQRFGAQPSIPYQHELVDK

SEQ ID NO: 10893 - protein, 233 aa, Enterococcus faecalis
MTIANGENAASGRGITGKIYKKFLQDGVDVVTMGNHTWDNKDIFEFIDDAKKMVRPANFPEDVPGQGMVFVKVNQLELAVINLQARTFMVPLEDPFKKAAELVAIARKRTPLIFVDFHGETTSEKQAMSWFLDGQVSAVVGTHTHVQTNDARILPKGTAFLSDVGMTGPYDGILGMKREPIIEKFMTALPKRFEVVETGRTILSACILEIDDQTGQAKMIEPIQISEDRPFQE

SEQ ID NO: 10894 - protein, 858 aa, Enterococcus faecalis
MPQKTKNTPMMEQYLSIKAQYKDAFLFYRLGDFYELFYEDAINAAQILELTLTSRNRNADDPIPMCGVPYHAAQGYIDTLIEQGYKVAICEQVEDPKTTKGMVKREVVQLVTPGTVMNSKGLEAKDNNYLTAVLTDGNQFGFAYVDLSTGELKTAVLADEEGVLNEASALQTKEMVLGSGIPESLKENLSLRLNIIFSTQETVEENAEFSFLTNELINPLEIEITGKLLSYLSVTQKRSLSHIQKAVEYQPDHFLKMDHYSKFNLELSQSIRTGQKKGTLLWLLDETKTAMGGRLLKQWLDRPLIQERQIKTRQEMVQSLLNSYFERLDLQAALTNVYDLERLAGRVAFGSVNGRDLIQLRTSLEQVPTIRQLIVGINQGEWDDLLVDLNPVEDLVELIATAINEEAPLQITEGNVIKDGYNDQLDEYRDAMRNGKQWLAELEAKERQETGIKNLKIGYNRVFGYFIEITKSNLANLEEGKYERKQTLANAERFITPELKELERLILEAEEKSVELEYQLFLAVREQVKTNIDRLQTLAKTISAVDVLQSFATISERYQYVRPTLRSNTKNLAIVEGRHPVVEKVLGHQEYIPNSIRMNPETDILLITGPNMSGKSTYMRQLALTVVMAQIGCFVPAESAEMPIFDQIFTRIGASDDLIAGQSTFMVEMMEANQALRHATPNSLILFDELGRGTATYDGMALAQAIIEYIHREVQAKTLFSTHYHELTVLDETLKGLKNIHVGAVEKDGEVVFLHKMMEGPADKSYGIHVAKIAGLPSPLLERAATILSALEAEETTIPSSVHHEEVSEVHEETEQLSLFKEVSTEELSVIDTLKKMNLLEMTPLDALNMLHQLQKRI

SEQ ID NO: 10895 - protein, 710 aa, Enterococcus faecalis
MGKIQELSEQLANQIAAGEVVERPASVVKELVENALDAGSTQIDIFIEEAGLKTIQIIDNGEGIAKEDVLNAFKRHATSKIHTRDDLFRIRSLGFRGEALPSIASVSEMIVETATAEEEEGSYVILKGGKVEENRPAALRKGTKMTVSNLFYNTPARLKYVKTIQTELANIGDIVNRLALSHPKVAFRLVHDGHKMMSTTGNGDLKQTIAGIYGISTAKKMLKIEGKDLDFTLTGYVSLPEVTRASRNYLSTIINGRYIKNFALNKAIVAGYGSKLMVGRFPIAVLEIEMDPLLVDVNVHPTKQEVRLSKEKDLMALIEQAIQEVLSQEQLIPNAADNLRFKKKLPPEPKAEQMEIPLSTEQPAVKQRPGSLSYNPATGRFYAEHATDETPASSAPEAVNQTERAVDPMDDPFAPPVPESTSVAEETSAYETSSAAVDSENHWETASNEQQVIAEETKITEVPDSEPSLRSSEAADEVFQEEMKLHPEFDANSATSQRELKQALNKLEEERPTERFPELEYFGQMHGTYLFAQSKDGLFIIDQHAAQERIKYEYFREKIGEVSDDLQELLVPIVIDYPNSDALKIKEQKETLAEVGIHLEDFGQNSFIVRAHPTWYPAGEEESIVREMIDMLLTTGSVSVKKFREATAIMMSCKRSIKANHYLNEQQARVLLKDLALCENPFNCPHGRPVLIHFTNSDMERMFKRIQDPH

SEQ ID NO: 10896 - protein, 327 aa, Enterococcus faecalis
MEVLMSKHYFDPRLKIFSLNSNRPLAEKIADAVGVELGKCSVTQFSDGEIQVNIEESIRGAHVYVIQSTSSPVNDNLMELLIMIDALKRASAKTINVVMPYYGYARQDRKARAREPITAKLVANMIEKAGATRMLTLDLHAVQIQGFFDIPVDHLMGAPLIADYFIEHGIQGDDVVVVSPDHGGVTRARKLAEFLKAPIAIIDKRRPKANVAEVMNIIGHVEGKTCVLIDDMIDTAGTISLAANALKEAGAKDVYASCTHPVLSGPALQRIEDSAIERLVVTDSIYLSDDRKIAKIDEVSVGELIGDAIKRIHENKPVSPLFETKNK

SEQ ID NO: 10897 - protein, 914 aa, Enterococcus faecalis
MSIQVHKEAPNMTILELTFATNQLTTTFFNHKLEPLHQKTFPFEALTIEETVPELCQLIVAEAAPILGGIVADFPEDFFSPEETLALVPQAVIQAFAEQLNTPLLTAAEQVAAPNLLAAFEEKRQYLAWHLDYYGYVPGKNEYAVESLLTVGNGFLGLRGTTPEMTISDDHYPATYIAGLYNTAASEVAGQVVENEDFVNAPDNQHIALKIGDATDWLTISPDTLQQLHRQLNLKTGLFVAEMILKDADNQQIKLTTKKIANMAQPNDYHLQYTFEPLNFSAPITLKTVTDGSVYNYNVARYRNLTAKHFQVTALSAQENKTVIEVCTNQSNLSVRETALITGDFFEKEAITIQEEAEKIAQVVTVMAHQGTRYTLEKQVFVQASHAEQSWQVPFTPKDSFAAAAQESARAWQTLWQQANITVTGDLMSQKLLRIHSYHLLASASPFSNQAQALDVSITARGLHGEAYRGHIFWDEIFILPFYIQHYPDTAKQLLLYRYHRLEKAKENAAASQYRGAMYPWQSGRDGRETTQKLHLNPLNGHWGEDHSILQRHVSLAIAYNAWLYWHSTQDHEFMKQYGGEMLLEIAQFWNSAATLDDATGRFFIDKVMGPDEFHEGYPDQAESGLKNNAYTNLMVVWLFEELTNILALFSEEEQAQLFAKTQTSSADLARMQQIQNSLEIEVNSDGIIAQYEGYFGLKEIDWAAMKEKYGNIYRMDRILKAEGESPDDYKVAKQADTLMLFYNLDKTRVDQILEDLGYQLPADYLEKNLLYYLKRTSHGSTLSRIVHAQLAEMAQFHELSWQLYQEALYSDYRDIQGGTTAEGIHTGVMAATIHVTLATYAGVDTRQNELSICPNLPEHWQALAFQFIHQGVTYQFSLTQTSVTITADKDTQLLVQGALIPLTAERPKEVHYQ

SEQ ID NO: 10898 - protein, 434 aa, Enterococcus faecalis
MIKKDYAQIKETLYTETLANGLKVYLLPKNDFQKTYGLFTTDYGSIDNTFVPIGQEEMIEVPDGIAHFLEHKMFEKEDGDVFQKFGQQGASANAFTSFTKTSYLFSTTDQVTQNLETLLDFVQSPYFTKETVEKEKGIIGQEIQMYLDDPNWCLFFGILGNLYPKHPLHIDIAGTVASIAEITAEDLYTCYNTFYHPSNMTLFVVGKMDPEALMAFIRENQAAKEFPAAQPIRRHFPEETAADIVKESAIEMAVTRAKVLVGLKGLDEVPTTGRDLMKYQVTVNLLLQLLFGNTSQNYLALYDEGLLDDSFSYDFNLDRSFHFADIGGDSEQPEVLAERIEAILLSATTSPELTEENLSLLKKKMIGKYFQSLNSLEYIANQFSQSLFGETTLFDKIEVIESIQLADVRQVAETLIREEGLSRFYMYPKGETEQ

SEQ ID NO: 10899 - protein, 192 aa, Enterococcus faecalis
MNLPNKLTVLRIFMIPIFIIIVSVPMDWGTISFGDTTLAVTQLVGAIIFAVASFTDWLDGKIARAQGLVTNFGKFADPLADKMLVMTAFIVLVGQGKVPAWIVAIIVCRELAVTGLRLLLVEHGEVMAAAWPGKVKTATQMVAIILLFINNIPFSALHLPLDQIMLYACLIFTIYSGVDYFAKNKDVFKGSM

SEQ ID NO: 10900 - protein, 333 aa, Enterococcus faecalis
MLKKQKIAIVNSSSFGQIFPEHLTRLEKIGTVKHFTVDSEIGGKELAERLQGYTIIIASVTPFFTKEFFEHKDELLLISRHGIGYNNIDLDAAKQHDTIVSIIPALVERDAVAENNVTNLLAVLRQTVAADASVKADQWEKRANFVGRTLFNKTVGVIGVGNTGSCVVETLRNGFRCDVLAYDPYKSATYLQSYGAKKVDLDTLLASADIICLCANLTEESYHMIGSAEIAKMKDGVYLSNSARGALIDEEAMIAGLQSGKIAGLGTDVLEEEPGRKNHPYLAFENVVMTPHTSAYTMECLQAMGEKCVQDVEDVVQGILPQRAVQEVSRYVS

SEQ ID NO: 10901 - protein, 718 aa, Enterococcus faecalis
MIEIGKKLNGRYHIIGSIGSGGMANVYLAHDLILDRDVAVKVLRFDFQNDQAAIRRFQREALAATELVHPNIVSVYDVGEEDGLQYLVMEYVKGMDLKRYIQTHFPIPYSTVVDITQQILSAVAMAHEHRIIHRDLKPQNILIDEHGTVKITDFGIAIALSETSITQTNTMLGSVHYLSPEQARGSMATNQSDIYAVGIILYEMLTGNVPFDGESAVTIALKHFQEEIPSVKMFDPGIPQSLENVVRHATAKDPSDRYKTANEMAEDLYTSLSASRLNEPAWEPTALLGETKVLTPIPEDIAEPEETTPVEVPEDIADDILAEQPPKKNRKKLWIGLAIAALIALAIGGLAFAMSGGKDVEVPDVTNETKAAASQALQSAGLKVDSETKKIPDDKIEEGKVVKTDPEAKSSVKKDRSVTLYISSGTEKIEMADYTNESYESAVEALKKLGFSEDQITTKKEYSDSVSTDNIIKQKPAAGKKVDPKKDKVTLTVSEGPEAVTLPSYAGYSYTNAVNALAQLGISESQITRVDQASDTVEPGLVITQDPAPGGTVTPKNGQVTLYVSKGSDKVTLSDYSGISYDNAVSRLIALGIPESQIKRVDEESDKVEKDTVISQEPASGTAVDPKNDTITLHVSKGSDSVTVPDISGYSPKAAEDSINNAGLKINEQGLSGSGDGQVVERTSPSAGSKVKKGDSVTVYYSKANDSKSTTSESSTSN

SEQ ID NO: 10902 - protein, 346 aa, Enterococcus faecalis
MFLKGRKGCVWMQGNEQLLEVSGLETAFRIKDDYYNAVDDVSFELKKNEILAIVGESGCGKSTLATTIMGLHDPNHTKITGEILYNNLNLTTFNETLYNKVRGNDIGMIFQDPLSALNPLMRIEDQIKESLTYHTKMTAQQKQARAIELLDQVGIPNPERVGKQYPHELSGGMRQRVIIAIAIACKPPILIADEPTTALDVTIQAQILDLLKDLQEETGSGIILITHDLGVVAEMADRVAVMYAGQFVEVATAEELFSHPKHPYTRSLLQSIPQENSDEEELHVIEGIVPSLTKLPRKGCRFAPRIPWIDASEHEENPTLHEVAPNHYVRCTCYKHFHFRDGEGEA

SEQ ID NO: 10903 - protein, 1192 aa, Enterococcus faecalis
MYLKRIEITGFKSFADKTIIEFEDDVTAVVGPNGSGKSNITEAVRWVLGEQSAKNLRGGKMNDIIFAGSEGRKPLNIAEVTVTLDNNDHYLALDYSEISVTRRLKRTGESDFFINKQACRLKDIQDLFMDSGLGKESFSIISQGKVEAIFNSKPEDRRGIFEEAAGVLKYKQRKKKAEQKLFETEDNLSRVQDIIYELEDQLVPLAAQADAAKKYLALKEELTEIDVNLTVTEIQEAKAIWETKTQELTAIEEKLAGASKQVHDLEGKLVRLRSKRNRLDEQIETEQQQLLQVTEALKQAEGQKNVLIERSKHTSQTASEYEETLAETAEKIVRYREELQTLETAIAEKTAQRQTLKEALALATKDVEKYSKSSKELMEELRSQYVEVMQEQANTANDLKYLERQYQQETAKNQQSLAKHEALEEQMVEALAMKETLEKEQKVAKQGLQEQLEEYTALKATLEAKRERLAQRQNDMYQAMNQVQQAKARQKSLQEIQENYAGFYQGVKAVLRHKNQLTGIVGAVAELIEVPKEYTLAIETALGGAAQHIVVENEKDGRAGITFLKQQHSGRATFLPLTTIKPRSVSAMVQNRLAGAPGFVGIASELVRYPEQVQTVIQNLLGVTILAADLTSANQLAKLVNYQYRVVSLEGDVMNPGGSMTGGANKRGNQGSLFSQAQELQTITEQMTQLETQLRSVEQEVQALSQEVKTATERAEMLRSAGEQNRLKQQEIDNKLANQTETITRLTKEKRLFEYESRELHQFLTEYQTKKATLTEQQASLTATKERLDAEMKQVEQEASQMETFKAQAQERLTTVQAEQAVAAEQCAHFARQKQDKQEQLDELLIRETAIRQQLQQLSSHSSDHQLTEEGLAAQVAQLAEKQTALQTSLQTARSQRQALQEEVDELDTKLAEENKRQQQYLADKTQIEVLKNRAEMQLDSSLSYLQEEYSLTFEAAYEAYFPIDDLAQAQQTVKRLKQEIERLGPVNLSAIEQFEQVDERHQFLVSQRDDLLNAKEQLFETMDEMDQEVKERFKEVFEAIRGQFKVVFPNMFGGGRAELVLTNPEDLLNTGIEIEAQPPGKKLQHLSLLSGGERALTAIALLFSIIRVRPVPFCILDEVEAALDEANVARFGHYLSEFEDGTQFIVVTHRKGTMEAADVLYGVTMQESGVSKIVSVRLEEVKEGGAIEKSN

SEQ ID NO: 10904 - protein, 442 aa, Enterococcus faecalis
MGFFDKIKKAFSAEKKEEEKQEIVEETVDETPSDESAPAESKETAAEEAQTTPETAAEEVAETADLTDNAEMEKLAGVEEALEEEPEEILTEETQEVVVEAPEEESSVVTPLAEPTDTQVSEEIEESKEEQVQEKYEKGLEKTRKTFGQRLNELFANFRSVDEDFFEELEETLIGADVGFDTSLKITEALRQEVKLRNVKKPAQVQNTIIEKMVDLYEEAGINENNAINLQPNGLTVILFVGVNGVGKTTSIGKLAHQYKLEGKKVLMAAADTFRAGAIDQLVVWGERASVEVVRGNAGGDPAAVVFDAVERAKAEQADVLLVDTAGRLQNKVNLMKELEKIKRVIQREIPDAPHEVLLVVDATTGQNAMTQAKQFKETTDVTGLVLTKLDGTAKGGIVIAIRNELHLPVKLVGLGEGINDLEPFNANDFAMGLFKGLLKDV

SEQ ID NO: 10905 - protein, 317 aa, Enterococcus faecalis
MKKKFLAMMAVSMMGLLMLSACQTNKKTADSATTETTAKTEVTVKDTNGQLTVPKNPQKVVVFDNGSLDTMDALGVGDRVVGAPTKNIPAYLKKYQKVESAGGIKEPDLEKINQLKPDLIIISGRQQDYQEQLKAIAPTIYLAVDAKNPWASTKQNIETLGTIFDKEEVAKEKITGLEKEIADVKKQAEASANNALVVLVNEGQLSAYGKGSRFGLIHDTFGFKAADDKIEASTHGQSVSYEYVLEKNPGILFVVDRTKAIGGDDSKDNVAANELIQKTDAGKNDKVIMLQPDVWYLSGGGLESMHLMIEDVKKGLE

SEQ ID NO: 10906 - protein, 1300 aa, Enterococcus faecalis; identical to SEQ ID NO: 4903

SEQ ID NO: 10907 - protein, 376 aa, Enterococcus faecalis
MKLTVKRSVFLQELQTVQRAISSKTTIPILTGVKIVLSEDGLSLTGSNADISIESFLSKDDEKAQMTIERTGSIVLQSRFFGEIIRKLPEDMFTMEVLDNNQVAITSGKADFTVNGLDADNYPHLPVIDTQNQMKLPVHLLTKIISETGFAVSMHESRPILTGVHFILENQKLLAVATDSHRLSQRVIPTEQAVEDFNIVIPGKSLTELSRSLTNEEEMVEISIMENQVLFKTETMYFYSRLLEGNYPDTNRLIPTSHNTQIEFYVPELLSAIERASLLSHEGRNNIVRLSISPDSVVLYGNSPEIGKVEEALNYENVSGEALDISFNPDYMKDALRAFGDMNITVKFLSPIRPFTLEPTETELDFIQLITPVRTN

SEQ ID NO: 10908 - protein, 447 aa, Enterococcus faecalis
MPDVESFWHSLEEAYQAILSAPSFDAWIKTTRPLKLDNNQLWLEVPSAVHRDYWEKNLSAKIVETGFKLTGAEVMPHFVVADEKDAALAQELEEPAEEEVVFSEQSKKAMLNPKYTFDTFVIGKGNQMAHAAALVVAEDPGSIYNPLFFYGGVGLGKTHLMHAIGHQMLVNQPDAKVKYVSSETFTNEFINSIQTKTSEQFRKEYRNVDLLLVDDIQFLAEKEATLEEFFHTFNDLYNENKQIVLTSDRPPNDIPKLPERLVSRFAWGLSVDITPPDLETRIAILRKKADAERLEIPDDTLSYIAGQIDSNIRELEGALVRVQAFATINGEDITTSLAADALKSLKSVGSKNQLSILQIQEEVSKYYHVPLKDLKGKKRVKTIVVPRQISMYLAREMTDNSLPKIGAEFGGKDHTTVIHAHEKIQQLLEKDPAIQKEVSEIKNLLNS

SEQ ID NO: 10909 - protein, 295 aa, Enterococcus faecalis
MERLRRTMMFVPGANAAMLRDAPLYGADSIMFDLEDAVSLKEKDSARVLVHSALKTFDYGNIEIVVRINALDAGGAEDIEAMVLAGVDVIRLPKTETAQDIIDVEAVITEVEQQNDIPVGTTKMMAAIESAEGVLNAPAIAKSSTRLIGIALGAEDYVTNMKTRRHPDGQELFFARSMILHAARAAGIAAIDTVYSDVDNTEGFEAEVRLIKQLGFDGKSVINPRQIPLVNNIYAPTEKEIQNAKEVIWGIREAEAKGSGVISVNGKMVDKPIVERAERVIALALAAKLITEEEI

SEQ ID NO: 10910 - protein, 310 aa, Enterococcus faecalis
MGKKMVVALGGNAILSNDASAHAQQQALVQTSAYLVHLIKQGHRLIVSHGNGPQVGNLLLQQQAADSEKNPAMPLDTCVAMTQGSIGYWLSNALNQELNKAGIKKQVATVLTQVVVDPADEAFKNPTKPIGPFLTEAEAKEAMQAGAIFKEDAGRGWRKVVPSPKPIDIHEAETINTLIKNDIITISCGGGGIPVVGQELKGVEAVIDKDFASEKLAELVDADALVILTGVDYVCINYGKPDEKQLTNVTVAELEEYKQAGHFAPGSMLPKIEAAIQFVESQPNKQAIITSLENLGSMSGDEIVGTVVTK

SEQ ID NO: 10911 - protein, 465 aa, Enterococcus faecalis
MQSATMEFDTIAAISTPPGEGAISIVRLSGEQAVAIANKVYRSGTKDLAKVPTHTIHYGHIVDPQNDQLIDEVMLSVMRAPKTFTREDVVEINCHGGIVVVNQLLQLLLREGARMAEPGEFTKRAFLNGRMDLSQAEAVMDLIRAKTDKAMNVALNQLDGNLSALIRSLRQEILNTLAQVEVNIDYPEYDDVEELTTKLLLEKAEFVKAQIQQLLTTAKQGKILREGLSTAIIGRPNVGKSSLLNHLLREEKAIVTDIAGTTRDVIEEYVNVRGVPLKLIDTAGIRETEDIVERIGVERSRKALADSDLILLVLNQSEELTEEDRQLLEATKGLKRVILLNKMDLPTKLDPNELQELVPAEEILSVSVLSNTGLDQLEAKIADLFFGGQTGEKDATYISNTRHIALLDQAALSLQEVINGIEAGMPVDLVQIDMTRCWDYLGEIVGDSVQDELITQLFSQFCLGK

SEQ ID NO: 10912 - protein, 632 aa, Enterococcus faecalis
MNQYQAESYDVIVVGAGHAGSEAALAAARMGVKTLLLTINLDMVAFMPCNPSVGGPAKGVVVREIDALGGEMGKNIDKTYIQMRMLNTGKGPAVRALRAQADKHAYATEMKHTIEKEENLTLRQGIVEELIVEDGVCRGVVTSTGAAYRSQAVVITAGTALRGEIIIGELKYSSGPNNSQPSVGLANHLKELGLEIDRFKTGTPPRVKSSTIDYSVTEEQPGDKEPNHFSYSTPDSAYNQNQEPCWLTYTNETTHEIIQKNLHRAPMFTGIVEGVGARYCPSIEDKIVRFADKPRHQLFLEPEGLNTEEVYVQGLSTSLPEDVQTEMLHSIEGLEKVEMMRTGYAIEYDVVVPHQLRPTLETKVIENLYTAGQTNGTSGYEEAAGQGLMAGINAALKIQGKEPLVLKRSDGYIGVMIDDLVTKGTNEPYRLLTSRAEYRLILRHDNADLRLTEMGHEIGLVKEEQYAAYLVKKAAVEAEIARLGKHRIKPTKEVQAFLETKGAAGLKDGILARDFLKRPEISYQEVAQFIPAPEEALDPKVIEQVEIQIKYEGYIKKAMEKVEKLKRMEAKRIPENIDYQAINGLATEAKQKLQKIQPETIAQASRISGVNPADISILMVYIEQGKIAKVQG

SEQ ID NO: 10913 - protein, 225 aa, Enterococcus faecalis
MEFMLDTINLEAIRKYQKILPLAGVTSNPSIVKQAGKIDFFAQMKEIKKTIGQASLHVQVVGQTTEEMLEDAQTIVQQLGQETFIKIPVNEAGLAAIKQLKQANYRITATAIYTEFQGYLAIAAGADYLAPYYNRMENLTIDSQKVIEHLAAEIKRTNAKSKILAASFKNVAQINQACQMGAQAVTIAPELVTQGLAMPAIQKAVTDFQEDWVAVFGVETVNELA

SEQ ID NO: 10914 - protein, 291 aa, Enterococcus faecalis
MARDFLPHKKADFSFIIQAKIFRKALQEIAICVKVGKDDCETFFCFTKKEGVFMLPEEFRQLLAAKGIELTDQQMTQFDQYFHLLVEWNEKMNLTAITEEKEVYLKHFYDSVSLAFFEDFASDKAICDVGAGAGFPSIPLKIVFPSLNVTIVDSLNKRITFLTELVNQLGLANVSLYHDRAETFGQKAEFRGAFDYVTARAVARLNVLSELCLPLVKKEGYFLALKASKSEEEINEAKPAIATLGGQFQKEVGFTLPITADERHIVVIQKKKETPKKYPRKPGLPNKQPIK

SEQ ID NO: 10915 - protein, 253 aa, Enterococcus faecalis
MTRIISVANQKGGVGKTTTTVNLGACLANLGKKVLLIDIDAQGNATSGMGVPKPDVAHDVYDVLVNEEPITSVVQHTSRENLDIVPATIQLAGAEIELTSMMARESRLKLAIDEVRDMYDFVLIDCPPSLGHLTINAFTASDSILIPVQCEYYALEGLSQLLNTIRLVQKHFNPELKIEGVLLTMYDARTNLGAEVVEEVRKYFREKVYDTIIPRNVRLSEAPSHGLPIIDYDIRSKGAEVYQALAKEVLENE

SEQ ID NO: 10916 - protein, 371 aa, Enterococcus faecalis
MALTAGIVGLPNVGKSTLFNAITKAGAEAANYPFATIDPNVGMVEVPDARLQRLTELVKPKKTVPTTFEFTDIAGIVKGASKGEGLGNQFLSHIRQVDAICHVVRCFDDENIMREQNRDADFVDPLADIDTINLELILADLDSINKRYTRVAKMAKAKDKEAVEELAVLDKIKPVLEEGLSARTIEFTPEEEKIVKSLFLLTTKPVLYVANVSEDEVADPDNNEYVQQVRNFATSENAEVIVVSARAEEEIAELDSEEDKAEFLEAMGIEQSGLDQLIRAAYDLLGLATYFTAGEQEVRAWTFRKGIKAPQAAGIIHSDFERGFIRAETVSYEDLDKYGNMQAAKEAGRVRLEGKDYVVQDGDVMLFRFNV

SEQ ID NO: 10917 - protein, 325 aa, Enterococcus faecalis
MRIPMKNYARISCTSRYVPENCVTNHQLSEMMDTSDEWIHSRTGISERRIVTQENTSDLCHQVAKQLLEKSGKQASEIDFILVATVTPDFNMPSVACQVQGAIGATEAFAFDISAACSGFVYALSMAEKLVLSGRYQTGLVIGGETFSKMLDWTDRSTAVLFGDGAAGVLIEAAETPHFLNEKLQADGQRWAALTSGYTINESPFYQGHKQASKTLQMEGRSIFDFAIKDVSQNILSLVTDETVDYLLLHQANVRIIDKIARKTKISREKFLTNMDKYGNTSAASIPILLDEAVENGTLILGSQQRVVLTGFGGGLTWGSLLLTL

SEQ ID NO: 10918 - protein, 75 aa, Enterococcus faecalis
MVFEKIQAIIVEELGKDAEEVQLTTNIQEELDADSLDLFQIINEIEDEFDVKIETEDGIQTVQDLVTYVEKQQAN

SEQ ID NO: 10919 - protein, 318 aa, Enterococcus faecalis
MNQQLCELLGINYPIFQGGMAWVADASLASAVSNAGGLGIIAGGNAPKEVVKKEIKKVKELTEQPFGVNIMLLSPFADEIVDLVCEEQVPVVTTGAGNPAKYMARFKEHNIKVIPVVPSVALAKRMEKIGADAVIFEGMEAGGHIGKLTTMSGLPQIVDAVSIPVIAAGGIGDGRGMAAAFMLGAEAVQLGTRFLIAKECNVHPDYKQKVLKARDLDAVITCQHFGHPVRTLKNKLTAQYNQLEKQELQKEVPDLEMFEKIGQGALRKAVVDGDMDYGSVMAGQIAGLIKKEETAQEIIDSLMSECKAIVHKMNQRWG

SEQ ID NO: 10920 - protein, 313 aa, Enterococcus faecalis
MRCRMKTAILFSGQGAQYQGMGEELYHQEAIVRETFDEASHILGYEMAELCFTENERLNETEYTQPAILTVSVAFYRLLQQKGLTPDVVAGLSLGEYSALVASGALRFSEAVALVQKRGQYMTEAAPQGTGKMVAVMNAEREVIEKACQEASAFGIVAPANYNTPQQIVIGGEVAAVDQAMTLLKEAGVKRMIPLNVSGPFHTALLQPASKKLAQDLAKLNFQTMQIPVISNTTAEIMPQEAIQALLEKQVMSAVRFEDSIETMKAMNVGTMIEVGPGKTLTGFVKKIDKTIEMHRVEDVATLTETLTALTGR

SEQ ID NO: 10921 - protein, 245 aa, Enterococcus faecalis
MELTGKNVFITGSTRGIGKAVALAFAKEGANIVLNGRSEITPEQRQEIEAFGVKCIGLSGDISDFDAAGEMIQATVDQLGSIDILVNNAGITNDKLLLRMTKEDFNACLDINLVGTFNMTQQAVKRMMKQRSGRIINMASVSGLMGNVGQANYAASKAGVVGFTKSVAREVAPRGITCNAIAPGFIQTEMTDVLSEKVKTQMNAQIPLQTFGQVEDVAATAIFLAKSPYITGQVVNVDGGLVMHG

SEQ ID NO: 10922 - protein, 162 aa, Enterococcus faecalis
MQLEEVKALLTQFDQSTLTEFDLREGSFELYMNKNTVSGRSAVEPVVQPQETPVAASGVSVPVETVSVVEETPTNTPTANEKTEEITSPIVGIVYLQPAPDKENFVKVGDTVKTGDVVCIVEAMKLMNEITATVDGVITEILVNNEDVVEFGQPLFRVAKGE

SEQ ID NO: 10923 - protein, 141 aa, Enterococcus faecalis
MKLTITEIQEILPHRYPFLLLDSVEEVIPGERVVAKKNVTVNEQVFQGHFPGNPVLPGVLIIESLAQAGAVALLSMPEFKGKTAYFGGLDKAKFRQKVTPGDTLILEVELLKVRASAGMGKGVAKVNGKKVAEAELTFMIG

SEQ ID NO: 10924 - protein, 456 aa, Enterococcus faecalis
MFSKVLIANRGEIAVRIIRACRELGVQTVAVYSEADQEALHTQLADEAICIGPAKATDSYLNVQAVLSAAIVTNAEAIHPGFGFLSENSQFASMCEECNITFIGPKAETIDAMGNKINARQLMQKAKVPVIPGSDGVIDSVEEALTIAEEIGYPVMLKAAAGGGGKGIRKVLSKEELPKHFTSAQQEAKAAFGNDDMYLEKIIYPARHIEVQILGDQYGHVIHLGERDCSLQRNNQKVLEESPSIAISEEKRQMLGETTVRAAQAVHYENAGTIEFLMDPAGDFYFMEMNTRIQVEHPVTEMVTGIDLVKAQLEIASGEPLGYTQEDVILTGHAIECRINAENPAFNFAPSPGKIQNLLLPSGGMGLRVDSAMYSGYSIPPYYDSMIAKVIVHGENRFDALMKMQRALNEIVTEGIITNAEFQLDLITHDNVLTGDYDTSFLQETFLPNWEPESNH

SEQ ID NO: 10925 - protein, 288 aa, Enterococcus faecalis
MALFKKKNYIRINPNRADANDASKKPSVPDNMWAKCPSCKRTLYTKEMGAEKICPHCGYSFRIGAWERLAITVDEKSFHNWDSELVTKDPLNFPGYLEKIEKMQEKTGLDEAVLTGEATIEGQAVAIGIMDANFIMGSMGTIVGEKITRLFERATEKHLPVVIFTASGGARMQEGIFSLMQMAKISAALQRHNKAGLLYLTVLTDPTTGGVTASFAMDGDIILAEPQSLIGFAGRRVIEQTIRQELPDDFQKAEFLLEHGFVDQIVPRNLLRQRLSDLLRLHSLEGWR

SEQ ID NO: 10926 - protein, 262 aa, Enterococcus faecalis
MEKKTANDVVTLARDQDRLTTLEYIEAIFEDFLEFHGDRYFADDLAVVGGVATLQGKPVTVIGIQKGRNLPENIERNFGSPNPEGYRKALRLMKQAEKFNRPVITFVNTAGAYCGIGAEERGEGEAIAQNLLEMSDLKVPIISVIIGEGGSGGALALAVADEVWMLEHTIYAVLSPEGFASILWKDGSRAKEAAELMKITATELKELAIVDKVIPEVMNGQPLEQAKINRMLQKAFISKLTELAKLDTETLLEKRYQRFRKY

SEQ ID NO: 10927 - protein, 304 aa, Enterococcus faecalis
MTEQFILTSNDQQTQLNVRHWPCPSPKAVVQLIHGMAEHIQRYDEFARFLNQLGFAVIGHDHLGHGESVQPSAPIYGFFGEQGPENVVIDIHQVKQWAVNRYPQLPYFMMGHSMGSFALRNYLQDYPVTVQGVIFMGTGTSPLPLTAALPFIKKMAEKQPKKPAPFIDKLAFGSFSKKFPEASSFNWLSKNQANVADYENDPLMGFIFTNNGFATLFSLVKRANQRNWYQAIPKELPILIISGAEDPVGDFSKGPAKIQKQLKHAGFQHVTLRLFPTLRHEILLETEKATVFQEIGHWLTDLTN

SEQ ID NO: 10928 - protein, 375 aa, Enterococcus faecalis
MERRIRMTEAIHCIGCGAIIQTENPHELGYTPKTAFEKGMETGEVYCQRCFRLRHYNDIQDVQLTDDDFLRLLNGLGTEDALIVNVVDIFDFNGSLIPGLHRFIGDNPVLLVGNKVDILPKSLKKPKMVQWMRERAHEAGLRPVDVLLTSGKKPQEMQELLDTIEKYREGRDVYVVGVTNVGKSTLINQIIQQTVGVQDVITTSQFPGTTLDKIEIPLDDGHFLIDTPGIIHRHQMAHYLGKKDLKIIAPQKEIKPKVYQLNAEQTLFLGGLARFDYVQGAKSSFIAYVSNDLNLHRTKTATADAFYEKHVGGLLQPPRADEVAEFPELVRFEFSVKEKTDIVFAGLGWITVTEPGVVAGWAPKGVDVLRRKALI

SEQ ID NO: 10929 - protein, 666 aa, Enterococcus faecalis
MKNRNTMKRFKSKKLKGENFIMSIHITFPDGAVKPFDSGVTTFDVAKSISNSLAKKALAGKFNGVLIDLDRPIAEDGSLEIVTPDHEDALGILRHSSAHLMANALRRLFPNIKFGVGPAIDSGFYYDTDNGESPVTAEDLPAIEAEMMKIVKENNPIVRKEISRAEALELFADDPYKVELITDLPEDEIITVYDQGDFVDLCRGVHVPSTGRIQVFKLLSVAGAYWRGNSDNHMMQRIYGTAFFDKKDLKEFIKMREEAKERDHRKLGKELDLFMVSQEVGSGLPFWLPKGATIRRTIERYIVDKEISLGYQHVYTPIMADVELYKTSGHWDHYHEDMFPPMDMGDGEMLVLRPMNCPHHMMVYKNDIHSYRELPIRIAELGMMHRYEKSGALSGLQRVREMTLNDGHTFVRPDQIKDEFKRTLELMVAVYADFNITDYRFRLSYRDPNNTDKYFDDDAMWEKAQAMLKAAMDELELDYFEAEGEAAFYGPKLDVQVKTALGMEETLSTIQLDFLLPERFDLTYVGEDGENTHRPVVIHRGIVSTMERFVAYLTEVYKGAFPTWLAPIQATIIPVSVEAHSEYAYEIKERLQAQGLRVEVDDRNEKMGYKIRASQTQKVPYQLVVGDKEMEDATVNVRRYGSKETSVEDLSIFIDSMAAEVHNYSR

SEQ ID NO: 10930 - protein, 712 aa, Enterococcus faecalis
MKKNSFIDKIKKTDAAAKSQRGRKPHIPFRLNLLFFVIFTLFVSLIVRLGYLQIVEGEEFNKKITANSSLQITTPSPRGQIYDSQGKVLVSNKANLAITYTRGKNIEGKDILPIANKVNELINVPVDPNLTDRDKKDYWLANPENLKAAQARLTDQDKEDEKGNKITDEGTLYAKAVEKVTPEEIAFDDRTLQAVTIFKRMNAASQMNTVFIKNEGVTEGEIATIGEHTAEISGVSTGTDWTRDYSQSGALRSLLGTVSTEKQGLPAEEVDEYLKKGYARNDRVGTSYLEKQYEDVLQGKKAKSEVVLDNNGKIVSQTPISKGEKGSNLKLTIDSNFQNKVDEILQRNYSQIVKTIGPYSENAYVVAMNPQTGAILAMSGVSHDLQTGEVTPNPLGPILNFEVPGSVVKAGTLTAGYEAKVLQGNDTLLDEPIILAGTNPKASWWNSGGRNAQMQLTAEQALEYSSNAYMMKVVFKLMGVNYYPNMVFPYEIGDDKVFKELRNAYAEYGMGIKTGIDLPGESPGYVNKDFKDPAEAPKGGNLLDLSFGQYDNYTPLQLAQYVSTVANNGIRVQPHVVEGIYGNDENGALGKILKEIEPKVLNKVNISEDQIGILQQGFYNVVNGTSQFTTAPGLKSDKFSIAAKTGTAETQATDANGVVHTTVNSNLVAYAPYENPEIAISVVLPHLNDEESKPNQTIAKEVLEAYMEMYKK

SEQ ID NO: 10931 - protein, 175 aa, Enterococcus faecalis; identical to SEQ ID NO: 4993

SEQ ID NO: 10932 - protein, 1031 aa, Enterococcus faecalis
MKRGKHMKKTILILLFGLLTVVGLPMVTEAAEPVDATDATIFGAQAMVPNSTEDQTEKLQTLLSQTAKEGRALFLPQGSYALSKDITISSNYQLIGDTTGATILHNATGTPIQLKDTTYGTKTNVRLQNIAFDGINVTLKLMNQLTLANNIFYNPLKGFVVNLNADIGVKISGNIFMRDTAHMQPKIDFNRAIYIGGYSTPSRFQYMSDVDIVDNLFGLKVTELDAIKSTSRSDLAATITRLQTAIEAGAISVPNEQNYLSTGVNSFNMLKDVTVQHNFFYSPYDNEDLNGLVGDHAIYFRGAQNITVVGNHLRGLQNGPAGGFKFKSGRNITIMNNYLRNTGLIMYGTPEIGLAETQAEGAISELSNWLVANNIFDWKYWDNQYAIGMEYNRHTGNNNVFNGVFINNQFVNYHNIPQNRRRELLIASGGGFRPETSFVKDNTRDDGLKNGQLLVENWTEADYRLMPATWESLISPTLYEQYKNTPIPVRNTLATPVATTIVQGQSIDPQQLVANTNDADEAVPAAKIVNPEVLNEIGQQKVTVQLTYETGSLVTVNVPVTVEDPAKKLDLSQLQTVYASIGEANQYTVYSWQLFTAIGPKTIVPSYYQQATQLLAEGQVSGDKTQEQVDQLTSNLQSAMKVLVKKADITLERAEAENELASVHKLDESVYTTDSWQAMQEALIDTTTGEGSSKQLQQLLAWSDEELLEPILGGFKTPADAQKRINQLTQTIKTALLLLVEKSTETTSNTSESSTSSTTSESSSTSESSTSSTTNESSSTSESSTSSTTNESSSTSESSTPSTTSESSSTSESSTPSTTSESSSTSESSTSSTTNESSSTSESSTPSTTSESSSTSESSTPSTTSESSSTSESSTSSTTSETSNTNESNTPSTTSKTSSTSESSASSTTSATNSTSESSTPSTLNENSQSKGQNSVIYAVESNQDPNDAQSNSKPSAKASQTKESVAENQATKQIQTNKESSGTVKKADNTTKIAKKKFPKTGEQSSAVGSFLGLSFLSLAIATYCFKVKR

SEQ ID NO: 10933 - protein, 297 aa, Enterococcus faecalis
MTEPNLKDPRKLFYSDGFPQQDQETPALQDKMVPKPDCGEDSYVGNHKLENRRVLITGGDSGIGRAAAIAFAREGADIALHFFPGEEKDAEEVAHYIREAGRKVVLLPADLRDKQAPEELVAQARESLGGLDTLVLNAAQQISCAAIEELPMEQVIDTFHVNIIAMFGIVKAAVPHLPAGSSIVTTTSVQAFNPSEHLLDYAATKASIANFTVGLAKQLAPKGIRVNGVAPGPIWTPLQLDHGQPIEELPEFGQHSLLERAGQPAELAPVYVFLASNDASYVTAQVYGVTGGEAINL

SEQ ID NO: 10934 - protein, 321 aa, Enterococcus faecalis
MDIISYERVIQQLSFSEAIQVMKRCFAELQKGKISQSERHVEVLPDGENQNLFALMPAYLGKNRFFGAKIITAFPENPQKNLASHLGQILLFDSSTGRPVAMMDANAITWLRTAAVSALATDYLAAPKAKSIALIGAGQQASSHLAALQSVRAIEKVFIYDRTAERARKLIAKQQHNYPECTFIGCSSVQEAVQEAEIICTLTSSQDAFLEEKDVLPNAHINAIGTFTPTSRELTSDLVKNSQVFVDEYAAALKESGDLLIPISEGAFSAEKIVGSLGELVTGKVKLKAEQKGRTIFDAVGLAVEDLCCAEYIYQKIQGEK

SEQ ID NO: 10935 - protein, 328 aa, Enterococcus faecalis
MKLSILDQLTVPKNQSASDTLQEAKELAQLAEKLGYTRIWYAEHHGSDAFASATPEILVAHIASATEKIRVGAGGIMTMHYAPFKVAETFKTLAALYPDRIDLGMGRSPGGSPLTTLALNNGQPPQLDQFDKLPEILLFLREEFPEDHLYSKISAVPREVLLPQPWLLGASKESARSAGEYGINFSFAQFIHGHLPKEVLSAYYKHFRPVTEQQEPQVSAAYFTFAADTKEEAEYHAASFEHYIFATEHGLPNKFLSPEEALAFPYSEMDKLVLEQNKQRFVIGSSQEVAEFFHQQEELGLTEAMLITPGYDKQTRFQSFERLAKELL

SEQ ID NO: 10936 - protein, 1333 aa, Enterococcus faecalis
MKKLSFKKVKWGMHFLMAVALIAPSVTSTAYAVETTSQQSSEAVTSTTDSSRKQEPVITQETTDIKQEAPNQATSDSVKQSQETTAPTETTNLETSTAEKEETSTPQKITILGTSDVHGQLWNWSYEDDKELPVGLSQVSTVVNQVRAQNPAGTVLIDNGDNIQGTILTDDLYNKAPLVNEKTHPMITAMNVMKYDAMVLGNHEFNFGLPLIQKIQQEATFPILSANTYNKEDGRRFVKGTTTKELDFNQDGQPDLKVGIIGLTIPHIPLWDDPRVTSLNFLPLKEEAEKAVTELKTNDQADIIVASIHAGQQNSDPAASADQVIENVADIDAYILGHDHLSFTKQGAAPNGKTVPVGGPKDTGTEVVKIDLSVAKNADKWEVQEGTATIVPTTNVPADEAVKAATKEYHEKTRAFIQEEIGTATADFLPKQEIKGIPEAQLQPTAMISLINNVQKEVTGAQLSAAALFKYDSKLPAGKISYATIFDIYKYPNTLVSVPINGENLLKYLEKQGAYYNQTQPDDLTISFNPNIRVYNYDMISGVDYKIDISKPVGERIVDAKIDGQPLDPAKEYTIAMNNYRYGGLASQGIQVGEPIKNSDPETLRGMIVDYIKKKGTLDPEQEIERNWSIIGTNFDEKWRAKAIELVNDGTLQIPTSPDGRTPNAAAITKQDVRNAGFDLDNAYTIMHTNDVHGRLEAGKGELGMARLKTFKDQENPTLMVDAGDVFQGLPISNFSKGADMAKAMNEVGYDAMAVGNHEFDFGLEIALGYKDQLNFPILSSNTYYKDGSGRVFDPYTIVEKAGKKFAIVGVTTPETATKTHPKNVEKVTFKDPIPEVEAVINEIKEKYADIQAFVVTGHLGVDETTPHIWRGDTLAETLSQTYPELDINVIDGHSHTAVESGKRYGKVIYAQTGNYLNNVGIVTAPENEPTKKTAKLIPAEELLGLPENPAVKAIVDEARTNFNAENEKVIVDYIPFTLDGQRENVRTRETNLGNLIGDAIMSYGQDAFSQPADFAVTNGGGIRADIKQGPIKVGDVIAVLPFGNSIAQIQVTGAQVKEMFEMSVRSIPQKDENGTILLDDAGQPKLGANGGFLHVSSSIRIHYDSTKPGTRLASDEGNETGQTIVGSRVLGIEIKNRQTQKFEPLDEKKQYRMATNDFLAAGGDGYDMLGGEREEGISLDSVLIEYLKSATSLRLYRAATTIDLAQYKEPFPGERIVSISEEAYKELIGGGETPKPDPKPDPKPDPKPDPKPDPKPDPKPDPKPTPETPVATNKQNQAGARQSNPSVTEKKKYGGFLPKTGTETETLALYGLLFVGLSSSGWYIYKRRNKAS

SEQ ID NO: 10937 - protein, 461 aa, Enterococcus faecalis
MANVENRYAIILAAGKGTRMKSKLYKVLHPVAGKPMVEHILDQVEQTEPTEIVTIVGHGAEMIKSHLGERSQYALQAEQLGTGHAVMQAQELLGGKQGTTLVITGDTPLLTAETLKNLFDYHQGKNASATILTAHAEDPTGYGRIIRDHVGIVERIVEQKDASEEEARVQEINTGTFCFDNESLFEALAKTDTNNTQGEYYLTDIIEILKKEGKAVAAYQMADFDEAMGVNDRVALSTANKIMHRRLNEMHMRNGVTFIDPDTTYIDEGVVIGSDTVIEAGVTIKGKTVIGEDCLIGAHSEIVDSHIGNQVVVKQSVIEESVVREGADVGPYAHLRPKADVGANVHIGNFVEVKNATIDEGTKVGHLTYVGDATLGKDINVGCGVVFVNYDGKNKHQTVVGDHAFIGSATNIVAPVTIGDHAVTAAGSTITEDVPSEDLAIARARQVNKEGYAKKLPYMKD

SEQ ID NO: 10938 - protein, 176 aa, Enterococcus faecalis
MKKQLLIVDGYNMIGAWPELVQLKKQERLEDARELLLSRLSNYAKYEGLEIIVVFDAQLVPGIQQTYKKYLLTVVFTKEDETADSYIERLAGEKNDRLTQVTVATSDLAEQWVVFSQGALRTSANELYKAVQKTEKTIAIHATDIHFQQFRRNSPWNVEQLSKLSEKLEELSQKKD

SEQ ID NO: 10939 - protein, 179 aa, Enterococcus faecalis
MSWLKRSVAAVKRNDPAARTTLEVLLTYPGLHALFWHRLSHFLYRHQLFLLAKIHAQFWRFITGVEIHPGATIGAGVFIDHGMGIVIGETAEIEEDVVLFHGVTLGGTGRDTGKRHPTVKKGAMISARAQILGPVVIGERSKIGAGAVVISDIPADATAVGVPAKVVRLNGRKVEKGHD

SEQ ID NO: 10940 - protein, 491 aa, Enterococcus faecalis
MERGMNMTKVRVRYAPSPTGHLHIGNARTALFNYLFARHNDGEFIIRIEDTDQKRNIEDGEKSQLENLAWLGMEWDESPAHPGEYGPYRQSERKEIYQPLIDQLLSSNRAYKCYCTPEELEAEREAQQARGEMPHYAGTCANLTPSEQAAKEAAGLEPVIRFRVPRNTEYKFDDIVKGEITFESDNIGGDFVIQKRDGMPTYNFAVAVDDHLMKISHVLRGDDHIANTPKQLMIYEAFEWTPPVFGHMTLIINSETGKKLSKRDETILQFIEQYRELGYLPEAMFNFIALLGWSPVGEEEIFSQEDLIKLFDEQRLSKSPAAFDAKKLEWINNQYMKQMDLGELTDMCIPYLVADGRVEENPSPEKIEWLKQLVSLYQPQMSYAAEIVELSNLFFNEHPVLDDAAKEFLQGETVPTVLHAFKEQLEALDVFDVPSIKAAIKAVQKETGVKGKNLFMPIRIAVSGQMHGPELGETIELLGKEKALDHLNKVL

SEQ ID NO: 10941 - protein, 456 aa, Enterococcus faecalis
MAKKAKVQFECQSCGYVSPKYLGRCPNCGQWNSMVEEVIQDTSDRRARVSLTGKKTQPQRLSEVVPKKEPRVKTELVELNRVLGGGVVPGSLVLIGGDPGIGKSTLLLQVSQQLAATGGTVLYVSGEESAEQIKLRAERLGTVNETFYLYAETDMHEISRAIEKLEPDYVIIDSIQTMTQPDVTSVAGSVSQVRETTAELLKLAKTNGIAIFIVGHVTKEGSIAGPRMLEHMVDTVLYFEGDKHHTFRILRAVKNRFGSTNEIGIFEMQTHGLVEVMNPSQVFLEERLEGATGSSIVVAMEGSRPILVEIQALVTPTMFGNAKRTTTGLDFNRVSLIMAVLEKRAGLLLQNQDAYLKAAGGVKINEPAIDLALAISIASSYKEKGTSSSECFIGEIGLTGEIRRVNSIEQRVREAQKLGFTKVYVPKNNLGGWEAPEGIEIIGVSTIGETLRKVFK

SEQ ID NO: 10942 - protein, 524 aa, Enterococcus faecalis
MNIKFTPGNCYGLIGANGAGKSTFLKILSGEIQPTTGVVSMGPNERLATLKQNHFDYEDYTVLETVIMGHKRLYEVMKEKDAIYMKEDFSDEDGIRAAELEGEFAELDGWEAEPEAAVLLQGLNIPEELHDQKMSELTAGQKVKVLLAQSLFGKPDVLLLDEPTNGLDTRSINWLEEFLINFENTVIVVSHDRHFLNKVCTHMADLDFSKIKLYVGNYDFWLESSQLATKLQAQSNAKKEEQIKELQDFIARFSANASKSKQATSRKKMLDKITLDDIQPSSRRYPFVGFTPEREIGNDLLQVENVSVTIDGKKILDNISFNLTKDDKVAFIADSDITTTTLFKVIMGEITPDTGSVRWGVTTSQAYLPKDNSKDFEEPLTILDWLRQFAGKEEDDNTFLRSFLGRMLFSGEEVLKPVNVLSGGEKVRVMLSKLMLSKANVLVLDDPTNHLDLESITALNDGLMAFTGSILFASHDHQFIQTLANRIIAVSDKGVIDRAETTYDEFLENPEIQKQMDVLFSSDY

SEQ ID NO: 10943 - protein, 471 aa, Enterococcus faecalis
MFVFLTETLLIVKEYSIFTLERDWFYWYNDSGQKNYERGVRMSSVVVVGTQWGDEGKGKITDFLSENAEVIARYQGGDNAGHTIKFDGVTYKLHLIPSGIFYKEKISVIGNGVVVNPKSLVKELAYLKENNVATDNLRISDRAHVILPYHIKLDQLQEDAKGENKIGTTIKGIGPAYMDKAARVGIRIADLLDKEIFAERLQINLEEKNRQFVKMFDSEAIEFDDIFEEYYEYGQQIKQYVTDTSVILNDALDAGKRVLFEGAQGVMLDIDQGTYPFVTSSNPVAGGVTIGSGVGPSKINKVVGVCKAYTSRVGDGPFPTELFDETGETIRRVGKEYGTTTGRPRRVGWFDSVVMRHSKRVSGITNLSLNSIDVLSGLETVKICTAYELDGELIYHYPASLKELSRCKPVYEELPGWSEDITGCKTLADLPANARNYVHRISELVGVRISTFSVGPDRNQTNVLESVWAQI

SEQ ID NO: 10944 - protein, 338 aa, Enterococcus faecalis
MMKAALIHKYEQKELAIEEVPLPTIHDNDVLVKIIAASINPIDLKTKDGKVKMLLNYQMPLILGSDFAGIVVSVGKKVQNFRLGDAVYGRVPKNRVGTFAEYIAVDQAAVAMKPKNLTFEEAAAIPLVGLTSYQALHDIMNVQPGQKVLIQAGSGGIGTIAIQLAKLAGAYVATTTSSKNKEWVQALGADEVIDYRTQNFEEVLSDYDYVFDTMGGTILEKAFSVVKPQGKVVTLSGIPNERFAKEYGLPLWKQWAFKIATRKIHRLEQATDVSYHFLFMHPDGEQLALLTEFIEQGKLQPIIDRVIPFSQIQEAVDYSLTGRVQGKIVVKIADVDHD

SEQ ID NO: 10945 - protein, 460 aa, Enterococcus faecalis
MGENKMNELLQDRVPPQNIEAEQAVLGSIFLDADVLIEAMEYVEPKDFYRRSHQLIFQTMMTLSDRNEAIDVVTIKDRLEQENLLEDVGGLSYLSDLALAVPTAANVIYYAKIVEQKSLLRNLIQTATEIVTKGFEQGEDVESILDDAERSILEVSEKRNRSGFLSISDVLNTTIANIDQLYQNDEEITGLPTGYQALDKMTAGLQAEELIILAARPAVGKTAFALNIAQNVGTKTDKAVAIFSLEMGAESLVNRMLCAEGSIEASHLRTGQLSEEEWQNLIIAMGSLSRANIYIDDTPGIKITEIRAKCRKLAQEKGNLGLILIDYLQLIEGTGKENRQQEVSDISRQLKKLAKELKVPVIALSQLSRGVEQRQDKRPVLSDIRESGSIEQDADIVAFLYRDDYYDRGEGEDGDHEPPEVDNVVEVIIEKNRSGARGTVELLFIKEYNKFSSLSPRTEF

SEQ ID NO: 10946 - protein, 153 aa, Enterococcus faecalis
MKEMKVIFLQDVKGKGKKGDVKEVPTGYAQNFLIKNGYAKEANKGSMSALAGQKKAQEKHEAEVLAQAKEMQAFLEDEKTVVEIKAKAGEDSRLFGSIPSKQIAEALNKQYNVKLDKRKIELANPIRSLGYTNVPVKLHHEVTAKIKVHVVAE

SEQ ID NO: 10947 - protein, 658 aa, Enterococcus faecalis
MQKKRIQKNGFLIVVGLLLVEFLLYFLLTNKWLLLAVIIALDIFLLVVIRLLIRDVEITNVEKIQEASSIAEQSLDYVVNEVPVGIITYNGETRAVEWLNPYAASIFNKDNQLTLTASQVTSYLELAERNQDIFTIDENTYRFSVNKEQHTITFEDITKESNLYQEKVEMQTAIGIVSVDNYDDVTDTMDEKEISYLNSFITTMVSDWMDQYKVFYKRINAERYFFIAQWEDIQKMMDEKFSILDTIRKESANHEVAITLSMGIAYGGPTLDQTGTTAQTNLDTALVRGGDQVVVKEAKDEAKPLFFGGKTAVTTKRSQVRSRAMSMAIKGIIAESADIYIMGHRYPDMDALGSAFGVARLASFNNRKAWIVLDENEIIPDVKRVLEAIKEYPELEERIISPKEAMKRKKESSLLVMVDYHKPSLSISQELYERFDKVVIIDHHRRGDEFPAKPLLSYIESSASSASELVTELIEYQSNSANKLQAFEATMMLAGIVVDTKSFNTRTTARTFDVASYLRTCGADSSLVQYLLSSDLTSYLEMNNLISKGQKVTKDTVVVAVSEDKEYDSVTAAKTADTLLSMAGINAAFVITKRTDQQIGISARSNGSINVQIIMENLGGGGHFTNAAVQLSNVTVAEVKEQLLDVIRQNINEMYEQE

SEQ ID NO: 10948 - protein, 79 aa, Enterococcus faecalis
MAQQRRGGRKRRKVDYIAANHIEYIDYKDTELLKRFISERGKILPRRVTGTGAKNQRKLTIAIKRARIMGLLPFVSDEQ

SEQ ID NO: 10949 - protein, 188 aa, Enterococcus faecalis; identical to SEQ ID NO: 4981

SEQ ID NO: 10950 - protein, 100 aa, Enterococcus faecalis
MSQDTKYEIMYIIRPNIDEEAKTALVERFDTILKDNGAEVIESKDWEKRRLAYEMNGFREGIYHIVNVTSPSTAGAINEFDRLAKINDDIIRHMIVKVEA

SEQ ID NO: 10951 - protein, 833 aa, Enterococcus faecalis
MSEEIKENIQDVNLTSEMKESFIDYAMSVIVARALPDVRDGLKPVHRRILYGMNELGVTPDKPHKKSARIVGDVMGKYHPHGDSAIYESMVRMAQPFSYRAMLVDGHGNFGSVDGDGAAAMRYTEARMSKIALEMLRDINKNTVDFQGNYDDSEQEPVVLPARFPNLLVNGTTGIAVGMATNIPPHNLSEVIDATSLLMDNPDVTTNELMEVLPGPDFPTGGLVMGKSGIRRAYETGKGSITVRAKVELTEMPNGKERILVTELPYMVNKAKLIERISELHRDKRIEGITDLRDESSREGMRIVIDVRRDVSASVVLNNLYKMTALQTSFGFNMLAIEKGVPKILSLKRILENYVEHQKEVITRRTIFDKNKAEARAHILEGLRIALDHIDEIIAIIRGSQSDDEAKATLIERFEFSDRQAQAILDMRLRRLTGLERDKIENEYQELLKFIADLEDILARPERVIEIIKTELNDVRTKFGDARRTELLVGEVLSLEDEDLIEEEEVVITLTNNGYIKRMANSEFRAQRRGGRGVQGMGVHDDDFVKNLVSCSTHDTLLFFTNTGKVYRAKGYEIPEYGRTAKGIPVINLLGIDSAEKIQAIISVEGKAEAGKYLFFTTLKGTVKRTAVTAFSNIRSNGLIAISLKEDDELVNVVTTNGNQKMIIGTHAGYSVTFDENTVRDMGRTASGVRGIRLRENDYVVGAAILDENKEVLVITENGYGKRTKASEYPVKGRGGKGIKTANITEKNGPLAGLTTVNGDEDILLITNKGVIIRFNVDSVSQTGRATLGVRLMRMEDGAKVVTMAVVEPEEVEEEIVEVVETTENETTSETEE

SEQ ID NO: 10952 - protein, 649 aa, Enterococcus faecalis; identical to SEQ ID NO: 4979

SEQ ID NO: 10953 - protein, 339 aa, Haemophilus influenzae
MAIKIGINGFGRIGRIVFRAAQHRDDIEVVGINDLIDVEYMAYMLKYDSTHGRFDGTVEVKDGNLVVNGKTIRVTAERDPANLNWGAIGVDIAVEATGLFLTDETARKHITAGAKKVVLTGPSKDATPMFVRGVNFNAYAGQDIVSNASCTTNCLAPLARVVHETFGIKDGLMTTVHATTATQKTVDGPSAKDWRGGRGASQNIIPSSTGAAKAVGKVLPALNGKLTGMAFRVPTPNVSVVDLTVNLEKPASYDAIKQAIKDAAEGKTFNGELKGVLGYTEDAVVSTDFNGCALTSVFDADAGIALTDSFVKLVSWYDNETGYSNKVLDLVAHIYNYKG

SEQ ID NO: 10954 - protein, 262 aa, Haemophilus influenzae
MMYKAVFSDFNGTLLTSQHTISPRTVVVIKRLTANGIPFVPISARSPLGILPYWKQLETNNVLVAFSGALILNQNLEPIYSVQIEPKDILEINTVLAEHPLLGVNYYTNNDCHARDVENKWVIYERSVTKIEIHPFDEVATRSPHKIQIIGEAEEIIEIEVLLKEKFPHLSICRSHANFLEVMHKSATKGSAVRFLEDYFGVQTNEVIAFGDNFNDLDMLEHVGLGVAMGNAPNEIKQAANVVTATNNEDGLALILEEKFPE

SEQ ID NO: 10955 - protein, 302 aa, Haemophilus influenzae
MTEQFDKTYCGFIAIVGRPNVGKSTLLNKILGQKISITSRKAQTTRHRIVGIKTEGAYQEIYVDTPGLHIEEKRAINRLMNRAASSAIGDVDLIIFVVDGTHWNADDEMVLNKLRNAKAPVVLAINKVDNIKNKDDLLPFITDLSSKFNFAHIVPISAQRGNNVHELEKIVRQSLREGVHHFPEDYVTDRSQRFMASEIIREKLMRFTGEELPYSVTVEIEQFKVNERGTYEINGLILVEREGQKKMVIGAGGQKIKTIGMEARADMERLFDNKVHLELWVKVKSGWADDERALRSLGYMDE

SEQ ID NO: 10956 - protein, 291 aa, Haemophilus influenzae
MKLRRSMLFVPGSNAAMLSNSFIYKPDSIMFDLEDAVALKEKDSARLLVAHALQHPLYKEIETVVRVNPLDSEFGLLDLNSVVRAGVDVVRMPKTESAQDVLDMDHAITEIEKACGREAGSTKMLAAIESPLGITQANQIAFASKRLIGIALGAEDYVRNLKTERSPEGIELLFARCSILQAARAAGIQAFDTVYSNANNEEGFLKEAALIKQLGFDGKSLINPRQIELLHNLFAPTQKDVEQAKRIIEAAVEAERQGAGVVSLNGKMIDAPIIDRAKLVLERAKSGIREE

SEQ ID NO: 10957 - protein, 320 aa, Haemophilus influenzae
MSTPFKMERGVKYRDAAKTSIIPVKNIDPNQDLLKKPEWMKIKLPASSAKIESIKNGMRRHGLHSVCEEASCPNLHECFNHGTATFMILGAICTRRCPFCDVAHGKPLPPDPEEPQKLAETIQDMKLKYVVITSVDRDDLPDRGAGHFSECVKAVRELNPNIKIEILVPDFRGRITQALEKLKDNPPDVFNHNLENVPRLYKEIRPGADYEWSLKLLREFKEIFPNIPTKSGLMVGLGETNEEILQVMQDLRDNGVTMLTLGQYLQPSRHHLPVARYVPPTEFDEFRDKANEMGFEHAACGPFVRSSYHADLQASGGLVK

SEQ ID NO: 10958 - protein, 342 aa, Haemophilus influenzae
MKERIKAICLEKPNNVVVKEVPYPEKSDNDVLIQVESMGICGSDIGAYRGTNPLVTYPRILGHEIVGRVIESGIGMSDGVRVGDRVIVDPYVCCGQCYPCSIGRTNCCESLKVIGVHIDGGMQEVIRHPAHLLTKVPDNLPIHQLPLAEPLTIALHALHRTTLKSGEHIVIIGAGAIGLMAALAAVQYGAIPILVDILEQRLEYAKSLGIEHIVNPHKEDDIKRIKEITSGRMAEVVMEASGANISIKNTLHYASFAGRIALTGWPKTETPLPTNLITFKELNIYGSRTSKGEFEEALDMLATNKINASHIITKCIKFEEIPSFISDLSDHPENYLKINAVF

SEQ ID NO: 10959 - protein, 266 aa, Haemophilus influenzae
MSHITKIKNWNTNLRKNMENIVNRTYTRIGQLLKQDISQGIYSIGDKLPTEREISEKFGVSRTIVREAMVMLEVEKLVEVKKGSGVYVVRTPESIHMEHSDLPDVGPFELLQARQLLESSIAEFAALQATKKDILNLKQILNREKELLTQNQDDYSADKDFHLALAEITQNDVLVKLQEQLWQYRFNSAMWAQLHSRILQNDYHHLWIEDHQTILSAIQKKNANEARKAMWQHLENVKVKLFELSDVEDPHFDGYLFNTNPVVVGI

SEQ ID NO: 10960 - protein, 587 aa, Haemophilus influenzae
MQEQKLQENDFSTLQTFKRLWPMIKPFKAGLIVSGVALVFNALADSGLIYLLKPLLDDGFGKANHSFLKMMAFVVVGMIILRGITNFISNYCLAWVSGKVVMTMRRRLFKHLMFMPVSFFDQNSTGRLLSRITYDSQMIASSSSGSLITIVREGAYIISLFAVMFYTSWELTIVLFIIGPIIAVLIRLVSKIFRRLSKNLQDSMGELTSATEQMLKGHKVVLSFGGQHVEEVHFNHVSNDMRRKSMKMVTANSISDPVVQVIASLALATVLYLATTPLIAEDNLSAGSFTVVFSSMLAMMRPLKSLTAVNAQFQSGMAACQTLFAILDLEPEKDDGAYKAEPAKGELEFKNVSFAYQGKDELALNNISFSVPAGKTVALVGRSGSGKSTIANLVTRFYDIEQGEILLDGVNIQDYRLSNLRENCAVVSQQVHLFNDTIANNIAYAAQDKYSREEIIAAAKAAYALEFIEKLPQVFDTVIGENGTSLSGGQRQRLAIARALLRNSPVLILDEATSALDTESERAIQSALEELKKDRTVVVIAHRLSTIENADEILVIDHGEIRERGNHKTLLEQNGAYKQLHSMQFTG

SEQ ID NO: 10961 - protein, 629 aa, Haemophilus influenzae
MPIKILSPQLANQIAAGEVVERPASVVKELVENSLDAGANKIQIDIENGGANLIRIRDNGCGIPKEELSLALARHATSKIADLDDLEAILSLGFRGEALASISSVSRLTLTSRTEEQTEAWQVYAQGRDMETTIKPASHPVGTTVEVANLFFNTPARRKFLRTDKTEFSHIDEVIRRIALTKFNTAFTLTHNGKIIRQYRPAEAINQQLKRVAAICGDDFVKNALRIEWKHDDLHLSGWVATPNFSRTQNDLSYCYINGRMVRDKVISHAIRQAYAQYLPTDAYPAFVLFIDLNPHDVDVNVHPTKHEVRFHQQRLIHDFIYEGISHALNNQEQINWHTDQSAVENHEENTVREPQPNYSIRPNRATAGQNSFAPQYHEKPQQNQPHFSNTPMFPNHVSTGYRDYRSDAPSKTEQRLYAELLRTLPPTAQKDISDTAQQNISDTAKIISTEIIECSSHLRALSLIENRALLLQQNQDFFLLSLEKLQRLQWQLALKQIQIEQQALLIPIVFRLTESQFQAWQQYSDDFKKIGFEFIENQAQLRLTLNKVPSALRTQNLQKCVMAMLTRDENSSSFLTALCAQLECKTFNALADALNLLSETERLLTQTNRTAFTQLLKPVNWQPLLDEI

SEQ ID NO: 10962 - protein, 381 aa, Haemophilus influenzae
MRSIFSLFLEDVMTQQYAIDTLLAQAGNRSDERTGAVSAPIFLSTAYGHCGIGESTGFDYTRTKNPTRTVLEETIAKLENGDRGFAFSSGMAAIQVLMTLFTAPDEWIVSSDVYGGTYRLLDFSYKNNNSVKPVYVNTASASAIEAAINPNTKAIFIETPSNPLMEECDVVEIAKLAKKHNLMLIVDNTFLTPVLSRPLDLGADVVIHSGTKYIAGHNDALVGLIVAKGQELCDRIAYIQNGAGAVLSPFDSWLTIRGMKTLSLRMKRHQENAQAIAEFLKAQPQVESVLYPNKGGMLSFRLQDEAWVNTFLKSIKLITFAESLGGTESFITYPATQTHMDIPESERVARGITNTLLRFSVGIEDVEDIKADLLQAFANLK

SEQ ID NO: 10963 - protein, 314 aa, Haemophilus influenzae
MLRIYAPASSANISVGFDTLGAAISPIDGSLLGDVVQIESISTGFELESAGYFVRKLPKEPQKNIVYQAYVLFSEQLKLRGANVKPLRLTLEKNMPIGSGLGSSACSIVAALVALNQFHNEPFSKMELLEMMGELEGRISGSIHYDNVAPCYLGGVQFMVQSLGNICQKLPFFDNWYWVLAYPGIEVSTAEARAILPKSYTRQNVIAHGRHLGGFVHACHTHQENLAAIMMKDVIAEPYRESLLPNFAEVKQATRDLGALATGISGSGPTIFSIAPDLQTAIKLSSYLESHYLQNNEGFVHVCKVDNEGTREIK

SEQ ID NO: 10964 - protein, 237 aa, Haemophilus influenzae
MNIQHNLNLIQQKIETACKEENRNQNTVKLLAVSKTKPISAILSAYQAGQTAFGENYVQEGVEKIQYFESQGINLEWHFIGPLQSNKTRLVAEHFDWMQTLDRAKIADRLNEQRPTNKAPLNVLIQINISDEESKSGIQPEEMLTLAKHIENLPHLCLRGLMAIPAPTDNIAEQENAFRKMLELFEQLKQVLPNQQIDTLSMGMTDDMPSAIKCGSTMVRIGTAIFGARNYSTSQNK

SEQ ID NO: 10965 - protein, 462 aa, Haemophilus influenzae
MFENLSDRLSKTLRNITGKGRLTEDNIKETLREVRMALLEADVALPVVREFIAKVKESALGEEVNKSLTPGQEFLKIVQRELEKAMGEANESLNLATQPPAVILMAGLQGAGKTTSVGKLAKFLRERHKKKVLVVSADVYRPAAIKQLETLAQSVGVDFFPSDVKQNPVDIAKSALADAKLKFYDVLIVDTAGRLHVDTEMMDEIKQVHAALNPIETLFTVDAMTGQDAANTAKAFNEALPLTGVILTKVDGDARGGAALSIRQITGKPIKFLGVGEKTEALEPFHPDRVASRILGMGDVLSLIEDLERSVDREKAEKMAQKFKKGDDFTLDDFREQLIEMKKMGGMMSMLEKLPGAKNLSEHVKNQVDDKMFVKMEAIINSMTLKERANPDIIKGSRRRRIALGSGTQVQDVNKLLKQFDEMQRMMKKMRKGGMAKMMRGMQGLMGGGLGGLGGLGGMFKR

SEQ ID NO: 10966 - protein, 545 aa, Haemophilus influenzae
MQVKRLYVKLSRRQLLMRSGWQVGSPLVDPMCGSGTLLIEAAQMEAKIAPQLYRLHWGFDFWKAHNQSAWEKVKNEAIELAEEKQREIQPHFYGFDLDHRVLKKAQKNAQNAGVSHLIKWQQADVAALKNPRLNEVGTVICNPPYGERLGTTPALIALYSVFGQRLKKEFCGWNVSVFSSESTLLDCLRMRASRQFKAKNGPLDCVQKNYQVSERKSDAITDEKELEFNRTSEVAPDFANRLQKNIKKISKWAKQQELDAYRLYDADLPEYNLAVDRYADYIVVQEYAAPKNIDENKARQRLLDAVTATLQVTGVETNKLILKVRQKQKGTNQYEKLANKGEYFYVNEYGTQLWVNLTDYLDTGLFLDHRLTRKMIGELAKGKDFLNLFAYTGSATVHAALGGAKSTTTVDMSNTYLNWAEQNLILNDIEGKQHKLIQADCLQWLEKCDRQFDLIFADPPTFSNSKRMEESWDVQRDHVKLMRNLKRVLSNNGTIVFSNNKRGFKMNLVALEELGLSAIEISHKTLPLDFERNKQIHNCWMIQHI

SEQ ID NO: 10967 - protein, 185 aa, Haemophilus influenzae
MKFNIPIFLTIFRVILIPFFVIAFYLPIESSPFITTLIFFIAGVTDWLDGYLARKWKQTTRFGAFLDPVADKVMVVAALVLIVEHQHTFWITIPAIIMISREIIISALREWMAELGERSKIAVSWWGKWKTTAQMLALGGLLWRYNNYMEIAAIILLYIAAILTIWSMIQYLQVAKGSLLDNIQL

SEQ ID NO: 10968 - protein, 396 aa, Haemophilus influenzae
MSLYLKAEKIQSWRVLIMACAGFIFNTTEFVPVAMLSDIAQSFDMQTADTGLMMTVYAWTVLIMSLPAMLATGNMERKSLLIKLFIIFIVGHILSVIAWNFWILLLARMCIALAHSVFWSITASLVMRISPKHKKTQALGMLAIGTALATILGLPIGRIVGQLVGWRVTFGIIAVLALSIMFLIIRLLPNLPSKNAGSIASLPLLAKRPLLLWLYVTTAIVISAHFTAYTYIEPFMIDVGHLDPNFATAVLLVFGFSGIAASLLFNRLYRFAPTKFIVVSMSLLMFSLLLLLFSTKTIIAMFSLVFIWGIGISCIGLSLQMRVLKLAPDATDVATAIYSGIFNAGIGAGALFGNLATTYLGLNEIGYTGAALGLIGFIIFITTHLKYRHTFLLQNK

SEQ ID NO: 10969 - protein, 504 aa, Haemophilus influenzae
MATPVVALVGRPNVGKSTLFNRLTRTRDALVADFPGLTRDRKYGHAHIAGYDFIVIDTGGIDGTEEGVEEKMAEQSLLAIDEADIVLFLVDARAGLTAADIGIANYLRQRQNKITVVVANKTDGIDADSHCAEFYQLGLGEIEQIAASQGRGVTQLMEQVLAPFAEKMENADENDRTSEEEQDEWEQEFDFDSEEDTALIDDALDEELEEEQDKNIKIAIVGRPNVGKSTLTNRILGEDRVVVFDMPGTTRDSIYIPMERDGQQYTLIDTAGVRKRGKVHLAVEKFSVIKTLQAIQDANVVLLTIDARENISDQDLSLLGFILNAGRSLVIVVNKWDGLDQDVKDRVKSELDRRLDFIDFARVHFISALHGSGVGNLFDSIKEAYACATQKMTTSLLTRILQMATDEHQPPMIGGRRIKLKYAHPGGYNPPIIVVHGNQMDKLPDSYKRYLSNYYRKSLKIIGSPIRLLFQEGSNPFAGRKNKLTPNQLRKRKRLMKFIKKAKR

SEQ ID NO: 10970 - protein, 381 aa, Haemophilus influenzae
MKYALINCVIYTKYDVLRDFAVIINGEIIEAVIPQAELETGIKTIDLQGNNLTAGFIDLQLNGCGGVMFNDQTSVETLEIMQETNLKSGCTSFLPTFITAPDENIKSAVKIMREYLNKHKNQALGLHIEGPYLSIEKKGVHRPEYIREITPEMKDFLCENGDVITKMTIAAENPTINYTPDFVKAGIIVSVGHSNATYEVAKAAFHKGATFATHLHNAMSPISSGREMGVVGAVLDSDVYTGIIVDGVHINYGNVRIDKKIKGDKLCIVTDSIAAAGAPPELESFTFVGKTIYIKEGRCYDANDTIAGASITMMESIKNAVEYVEIPLAEAIRMSNLYPARAIGIDDRLGSVEKGKIANLAVFTPNYQVIGTVVNGKWKEN

SEQ ID NO: 10971 - protein, 288 aa, Haemophilus influenzae
MAKSGNVLNKIGSLYQSLTKSEKKIADTILRSPDLVSQCSLSEIAKHLQVGEATLVRFCRTIGFKGFSEFKLELSIELATKDNQDESILETEIMPSDDSLTIAQKLQTAVANVMEETINLLDLKQLEEVVKVLKKARRIFLFGVGSSGVTAEDAKNKLMRIGFQVDASGNNHFMYMQAALLTSSDVAIGLSHSGYSAETAHTIKIAKQNGATTVALTHSLRSPVTEYADYVLVNGNKQGKLQGDSIGTKIAQLFVLDLIYALLVQGEEDIAAQTKQKTLNVILEQRIK

SEQ ID NO: 10972 - protein, 410 aa, Haemophilus influenzae
MENEMSQNGSDRDPWSKPGQSNDQQPGNSSNNNGWNNNQNRGNQEQSPPDIEEIFNNLLKKLGGGNKKSGQNNGSSQGNTPFHFGKVIPLAVAIGAIIWGVNGFYTIKEAERGVVLRFGELHSIVQPGLNWKPTFVDKVLPVNVEQVKELRTQGAMLTQDENMVKVEMTVQYRVQDPAKYLFSVTNADDSLNQATDSALRYVIGHMSMNDILTTGRSVVRENTWKALNEIIKSYDMGLEVIDVNFQSARPPEEVKDAFDDAIKAQEDEQRFIREAEAYAREKEPIARGDAQRILEEATAYKDRIVLDAKGEVERLQRLLPEFKAAPDLLRERLYIQTMEKVMANTPKVMLDGNNGNNLTVLPLEQIMGKKSVTSAPSAVNSSPAFTAPERQNSYQPQPTTVAPIRQGRFN

SEQ ID NO: 10973 - protein, 76 aa, Haemophilus influenzae
MSIEERVKKIIVEQLGVKEEDVKPEASFVEDLGADSLDTVELVMALEEEFDIEIPDEEAEKITTVQSAIDYVQNNQ

SEQ ID NO: 10974 - protein, 242 aa, Haemophilus influenzae
MQGKIALVTGSTRGIGRAIAEELSSKGAFVIGTATSEKGAEAISAYLGDKGKGLVLNVTDKESIETLLEQIKNDFGDIDILVNNAGITRDNLLMRMKDEEWFDIMQTNLTSVYHLSKAMLRSMMKKRFGRIINIGSVVGSTGNPGQTNYCAAKAGVVGFSKSLAKEVAARGITVNVVAPGFIATDMTEVLTDEQKAGILSNVPAGRLGEAKDIAKAVAFLASDDAGYITGTTLHVNGGLYLS

SEQ ID NO: 10975 - protein, 312 aa, Haemophilus influenzae
MKKFAMVFPGQGSQTVGMLADLATEYPIVIETFKQASDALGYDLWYLVQQGPAEELNKTWQTQPALLAASVAIYRVWKEKFPQLKPEVMAGHSLGEYSALVCAGVLDFQDAIKLVELRGKLMQQAVPEGTGAMYAIIGLDNEAIINACKQAEEGEVVSAVNFNSPGQVVIAGAKAAVERAAALCKEAGAKRALPLAVSVPSHCALMKPAAEQLAVTLENIQINTPTISVLNNVDVKAETEGTEIRTALVRQLYSPVRWTETVEKMAQDGVLVLAEVGPGKVLNGLTKRIVGDLQAISVNDVASFNAVEEFLV

SEQ ID NO: 10976 - protein, 316 aa, Haemophilus influenzae
MNSRILSTGSYLPSHIRTNADLEKMVDTSDEWIVTRSGIRERRIAAEDETVATMGFEAAKNAIEAAQINPQDIELIIVATTSHSHAYPSAACQVQGLLNIDDAISFDLAAACTGFVYALSVADQFIRAGKVKKALVIGSDLNSRKLDETDRSTVVLFGDGAGAVILEASEQEGIISTHLHASADKNNALVLAQPERGIEKSGYIEMQGNETFKLAVRELSNVVEETLLANNLDKKDLDWLVPHQANLRIITATAKKLEMDMSQVVVTLDKYANNSAATVPVALDEAIRDGRIQRGQLLLLEAFGGGWTWGSALVRF

SEQ ID NO: 10977 - protein, 418 aa, Haemophilus influenzae
MTALYVQNKINGKIILPFSHSMTNVLRLNRSYGRTMLISNTYNQHFPQLTQEQLARNATKKVICGMSGGVDSSVSAFILQQQGYQVEGLFMKNWEEDDDTDYCTAAADLADAQAVCDKLGIKLHKINFAAEYWDNVFEHFLTEYKAGRTPNPDILCNKEIKFKAFLEYAAEDLGADYIATGHYVRRAGDNENAKLLRGLDPNKDQSYFLYTLSHKQVGQSLFPVGEIEKPIVRAIAEDLGLITAKKKDSTGICFIGERKFKDFLARYLPAQPGNIRTVDDEIIGRHDGLMYHTLGQRKGLGIGGLKNAGDEAWYVVDKDVENNELIVAQGHDHPRLFSKGLIASQLHWVDREPIRESLRCTVKTRYRQQDIPCVIEPIDDETIRVIFDEPQSAVTPGQSAVFYLGEVCLGGGIIAERI

SEQ ID NO: 10978 - protein, 324 aa, Haemophilus influenzae
MPQITLSAEVQPEQMGQRLDQTLAELFPEYSRSRLKTWIEADLVKLNDRITNIPREKVLGGERIEIIVEVEDETRFEAENIPLNIVYEDDDIIVINKPKDLVVHPGAGNPNGTVLNALLYHYPPIVEVPRAGIVHRLDKDTTGLMVVAKTIPAQTKLVRDLQKRKITREYEAVASGIMTKGGTVDQPMARHATKRTLMAVHPMGKPAVTHYRIMENYRNYTRLRLRLETGRTHQIRVHMAHIAHPLLGDQTYGGRPRPPKNASEDFMEVLRNFKRQALHAVMLRLAHPITGEMMEWYAPLPDDFVELLNALKADYLEHQDELDY

SEQ ID NO: 10979 - protein, 481 aa, Haemophilus influenzae
MIMEFEFSKMLEEVLTWIVAHLDGPLWDATIIILLGTGLFFTITTGFVQFRLFPASLREMWFGRSVEGSSLTPFQAFTTGLASRVGVGNIGGVATAIALGGEGAVFWMWVTAFIGMSSAFAESTLAQLFKIQDKDGSFRGGPAYYIVQGLKSRCMAVAFALALIFTFGFAFNSVQANSIVEATSNAWNWKGEYVGISLVIFTALIIFGGVKRIAIISSNLVPMMALFYLIMAVIILGMHIDMIPSVIHRIVQSAFSFDAAAGGMFGALVSKAMMMGIKRGLFSNEAGMGSAPNSAAAAHVKHPVSQGLVQMLGVFVDTMIVCTCTAVIILLSNNYGSETLKSISLTQNALQYHIGEFGAHFLAFILLLFAYSSIIGNYAYAESNIRFIKNKPWLVLLFRLMVLFFVYFGAVRSGNVVWNFADTVMAVMAIINLIAILMLSPIVWKLMKDYQRQLKEGKTPEFKIDEYPELRKKIFDSRIWK

SEQ ID NO: 10980 - protein, 146 aa, Haemophilus influenzae
MSEGNIKLLKKVGLKITEPRLTILALMQNHKNEHFSAEDVYKIFLEQGCEIGLATVYRVLNQFDEAHIVIRHNFEGNKSVFELAPTEHHDHIICEDCGKVFEFTDNIIEQRQREISEKYGIKLKTHNVYLYGKCSDINHCDENNSK

SEQ ID NO: 10981 - protein, 357 aa, Haemophilus influenzae
MAGNTIGQLFRVTTFGESHGIALGCIVDGVPPNLELSEKDIQPDLDRRKPGTSRYTTPRREDDEVQILSGVFEGKTTGTSIGMIIKNGDQRSQDYGDIKDRFRPGHADFTYQQKYGIRDYRGGGRSSARETAMRVAAGAIAKKYLREHFGIEVRGFLSQIGNIKIAPQKVGQIDWEKVNSNPFFCPDESAVEKFDELIRELKKEGDSIGAKLTVIAENVPVGLGEPVFDRLDADLAHALMGINAVKGVEIGDGFAVVEQRGSEHRDEMTPNGFESNHAGGILGGISSGQPIIATIALKPTSSITIPGRSINLNGEAVEVVTKGRHDPCVGIRAVPIAEAMVAIVLLDHLLRFKAQCK

SEQ ID NO: 10982 - protein, 116 aa, Haemophilus influenzae
MSNIIKQLEQEQLKQNVPSFRPGDTLEVKVWVVEGSKRRLQAFEGVVIAIRNRGLHSAFTLRKVSNGVGVERVFQTHSPAVDSIAVKRKGAVRKAKLYYLRERSGKSARIKERLGA

SEQ ID NO: 10983 - protein, 246 aa, Haemophilus influenzae
MWIGVISLFPEMFKAITEFGVTGRAVKHNLLKVECWNPRDFTFDKHKTVDDRPYGGGPGMLMMVQPLRDAIHTAKAAAGEGAKVIYLSPQGRKLDQGGVTELAQNQKLILVCGRYEGIDERLIQTEIDEEWSIGDYVLTGGELPAMTLIDAVARFIPGVLGKQASAEEDSFADGLLDCPHYTRPEVLEGLTVPPVLMSGHHEEIRKWRLKQSLQRTWLRRPELLEGLALTDEQRKLLKEAQAEHNS

SEQ ID NO: 10984 - protein, 82 aa, Haemophilus influenzae
MVTIRLSRGGAKKRPFYQIVVADSRSPRDGRFIERVGFFNPIAQGNAERLRINLERVNHWVAQGASLSDRVASLVKEAQKAA

SEQ ID NO: 10985 - protein, 241 aa, Haemophilus influenzae
MFKRLSLYTLLLCLVPFFIWGISYQWHGNSQLTQADYWLYLLTETGSVPYALITCVLFTLLFAFLFKNPKQWILGVIVMGISVIATQAAKTGAKALFEEPRPFTVYLAEQTHSTPENFYKNDRTLRAEIAKNFYSMDAITPAWLVHHYENETGYSFPSGHTIFAATWLMLAVGFTQLLGNRSFKAKLLVVGIAVWGLLMLISRVRLGMHYPIDLLVATLLAWLINSIIFAFLKKKAIFVMK

SEQ ID NO: 10986 - protein, 488 aa, Haemophilus influenzae
MSLRIKQEALTFDDVLLVPAHSTVLPNTANLSTQLTKEIRLNIPMLSAAMDTVTETKLAISLAQEGGIGFIHKNMTIERQADRVRKVKKFESGIVSEPVTVLPNLTLAELAEMVKKNGFAGYPVVDGENNLIGIITGRDTRFVKDLSKTVSQVMTKKEDLVTVKEGASREEILELMHQHRVEKVLVVNDSFKLKGMITVKDFQKAEQKPNACKDEFGRLRVGAAVGAGAGNEERIDALVKAGVDVLLIDSSHGHSEGVLQRVRETRAKYPNLPIVAGNVATAEGAIALADAGASAVKVGIGPGSICTTRIVTGVGVPQITAIADAAAALKDRGIPVIADGGIRFSGDIAKAIAAGASCVMVGSMFAGTEEAPGEIELYQGRAFKSYRGMGSLGAMAKGSSDRYFQSDNAADKLVPEGIEGRIPYKGYLKEIIHQQMGGLRSCMGLTGCATIDELRTKAEFVRISGAGIKESHVHDVAITKEAPNYRMG

SEQ ID NO: 10987 - protein, 523 aa, Haemophilus influenzae
MTNIHYHKILILDFGSQYTQLIARRVREIGVYCELWAWDVTEQQIREFAPTGIILSGSPESTTEENSPRAPEYVFNAGVPVLGICYGMQTMAMQLGGLTETSDHREFGYASVSLENSTALFANLNDNLTASEPKLDVWMSHGDKVTRLPENFKVTGTTLTCPIAAMSDESRRFYGVQFHPEVTHTKKGLELLTNFVVNICGCETKWTAENIIEDAVARIKEQVGDDEVILGLSGGVDSSVVALLLHRAIGKNLHCVFVDNGLLRLHEGDQVMEMFGDKFGLNITRVDAESRFLGELAGVSDPEAKRKIIGKVFVDVFDDESKKLTNVKWLAQGTIYPDVIESAASKTGKAHVIKSHHNVGGLPDYMKLGLVEPLRELFKDEVRKIGLALGLPAEMINRHPFPGPGLGVRVLGEVKKEYCDLLRRADAIFIEELRNSGWYEKTSQAFSVFLPVKSVGVMGDGRKYDWVISLRAVETIDFMTAHWAHLPYDLLGKVSNRIINEVNGISRVVYDISGKPPATIEWE

SEQ ID NO: 10988 - protein, 436 aa, Haemophilus influenzae
MFSRKDIIVLGMMIFALFLGAGNIIFPPMEGFSSGQHWTSASLGFVLTGVLMPFITLVVVAILGRGEELTKDLPKWAGTGFLVILYLTIGSTFAMPRITNVAYEMAWLPLGLTENNANVRFVFSLIFNLIAMGFMISPNTIISSVGKFMTPALLVLLIAVAITVFISPLSEIQAPSNAYENSHSLLIGLTSGYQTMDVLAAIAFGGIVARALSAKNVTKTKDIVKYTISAGFVSVILLAGLYFSLFYLGATSAAVAEGATNGGQIFSRYVNVLFGSAGTWIMAGIIVLASLTTLVGVTSASADYFSKFSVRFSYPFWAALFTAMTITVSQYGLTDLLRITIPALLLIYPVAIVLVLLQFLRKKLPSIKFTYNSTLLVTVCFSLCDSLNNVKMLPESINSLLKHFPLSSEGMAWLVPTLVMLVASIFIGKALHKTHS

SEQ ID NO: 10989 - protein, 709 aa, Haemophilus influenzae
  VARIANT (1)...(709): Xaa = Any Amino Acid
MNPIVKQFKYGQHTVTLETGAIARQATAAVMASMDDTTVFVTVVAKKDVKEGQDFFPLTVNYQERTYAAGKIPGGFFKREGRPSEGETLIARLIDRPIRPLFPEGFFNEIQVVATVVSVNPQISPDLVAMIGASAALTLSGVPFNGPIGAARVGFIDNQFVLNPTMAEQKQSRLDLVVAGTDKAVLMVESEADILTEEQMLAAVVFGHQQQQVVVEAIKEFAKEAGKPRWDWVAPQPNTDLINKVKAIAEARLGDAYRITEKQLRYEQIDAIKADVIAQITAEDEEXSEGKIVDIFTALESQIVRGRIIAGEPRIDGRTVDTVRALDICTGVLPRTHGSAIFTRGETQALAVATLGTERDAQIIDELTGERQDHFLFHYNFPPYSVGETGMIGSPKRREIGHGRLAKRGVAAVMPSLAEFPYVVRVVSEITESNGSSSMASVCGASLALMDAGVPIKAAVAGIAMGLVKEEEKFVVLSDILGDEDHLGDMDFKVAGTREGVTALQMDIKIEGITPEIMQIALNQAKSARMHILGVMEQAIPAPRADISDYAPRIYTMKIDPKKIKDVIGKGGATIRSLTEETGTSIDIDDDGTVKIAAVDSNAAKNVMGRIEEIVAEVEAGVIYKGKVTRLADFGAFVAIVGNKEGLVHISQIAEERVEKVSDYLQVGQEVNVKVVEIDRQGRIRLTMKDLAPKQETEINQEDSVEEQE

SEQ ID NO: 10990 - protein, 613 aa, Haemophilus influenzae
MTDKITFNDLGLPEFILKAVSDLGFETPSPIQQSCIPHLLNGNDVLGMAQTGSGKTAAFALPLLAQIDPSEKHPQMLVMAPTRELAIQVADACELFVKYAQGTRIVTLYGGQRYDIQLRALKQGAQVVVGTPGRILDHIRRGTLNLSELRFIVLDEADEMLRMGFIDDVETVMAELPENHQTALFSATMPEPIRRITKRFMNDPQEVKIKVNNENAPDIDQSCWYVHGVRKNEALLRFLEVEDFDAAIIFARTKTGTLDITELLEKNGFRSAALNGDMTQQLREQTLDRLRNGSLDIVVATDVAARGIDIERISLVVNYDIPLDAESYVHRIGRTGRAGRSGRALLFVEPRERRLLRNIEHLMKKGINEVELPNHLVLQECRRKKFVAKITKQLEHHDLEQYRSLLEDLFTADQDQENIAAAMLMLLQGKQKLILPPDPPMEKRRRERNDRGDRRENPRSAERRGERKGYGNPQPMDLYRIEVGRADGVEVRHIVGAIANEGDINSRYIGHIKLYDDYTTVELPQGMPKELLQQFAKTRVLNKQMQMSFLGAVKSDNSRGSDDFNGKRKGRGGDFRGERGRERGNDNRGNRKFNEKSNRTFSDKPRRDRRSSF

SEQ ID NO: 10991 - protein, 462 aa, Haemophilus influenzae
MVFPWQFLRHTEENHYTAIQARGSLYVGTINNQISYFINKDSERGFEYELAKAFADTLGVELEMKIFDNQEQLFDELDKHNIDLAAAHLLYHPKNAERFQIGPAYHSASWQLAYRKNENRPKNLGNVKKDIYISNNLALEETLKELQKQYPQLIWKRNQALTQEELLLQLAEGKIPYVIANSIDIAAIQQIKPELAIAFDITDEANVHWYLPNNPYRDLQTALLNFMNNAEETGLLDNLKEKYLGHISQFDYVDTRSYMNAIENTLPQFSPLFEKYKGELDWRLLAAVAYQESHWNPDATSPTGVRGIMMLTKNTAQHMKISDRTDPEQSIKAGSEYLHWLISQLPESIEKEERIWFALVAYNIGLGHLIDARRLTQNLGGNPDNWFDVKKNLPLLAEKRYYSQLKYGYARGYEAHQYVENIRRYMNSIVNYHRVQENQTTNDNANNESAVKNLEEIKENKD

SEQ ID NO: 10992 - protein, 382 aa, Haemophilus influenzae
MKYELDKTSGNARRGRLVFERPQGTFSVETPAFMPVGTYGTVKGMTPEEVRATGAEILLGNTFHLWLRPGQEVMRKHGDLHDFMQWHRPILTDSGGFQVFSLGKLRKITEEGVKFQNPINGERIFLSPEKSMEIQYDLGSDIVMIFDECTPYPATFDYAKKSMEMSLRWAKRSRDRFDELGNKNALFGIIQGGVFEELRKVSLEGLVNIGFDGYAVGGLAVGEPKEDMHRILEYICPQIPADKPRYLMGVGKPEDLVEGVRRGIDMFDCVMPTRNARNGHLFVTDGIVKIRNAKYRDDTSPLDPECDCYTCKNYTKAYLYHLDKCGEILGARLNTIHNLRYYQRLMAEIRQAIEDDRFDDFVVEFYARMGKPVPPLQLADKS

SEQ ID NO: 10993 - protein, 363 aa, Haemophilus influenzae
MRVSDFNFDLPDELIARYPKTDRVSCRLLQLNGENGEIFHRTFSDVLDLIDEGDLLIFNNTRVIPARMFGRKASGGKIEVLVERMLDEHRFLAHIRSSKSPKEGAELFLGEDKLGENNGIKAVMKARHGALFEVELSDKSTALLDVLQTIGHMPLPPYIDRPDEEADQECYQTVYSKVPGAVAAPTAGLHFDENLLEKLKAKGVNFEFVTLHVGAGTFQPVRVENIEDHVMHAEYVEVSQEVCNAIIATKKAGKRVIAVGTTSVRSIESAALSAEEFGNPDLIEPYFSDTSIFIYPGKKFRVVDCLITNFHLPESTLIMLVSAFAGYKNTMNAYKHAVKEKYRFFSYGDAMFINKNSNVRGLE

SEQ ID NO: 10994 - protein, 943 aa, Haemophilus influenzae
MENIDIRGARTHNLKNINLTIPRNKLVVITGLSGSGKSSLAFDTLYAEGQRRYVESLSAYARQFLSLMEKPDVDSIEGLSPAISIEQKSTSHNPRSTVGTITEIYDYLRLLFARVGEPRCPDHNVPLTAQTISQMVDKVLSLPEDSKMMLLAPVVKNRKGEHVKILENIAAQGYIRARIDGEICDLSDPPKLALQKKHTIEVVVDRFKVRSDLATRLAESFETALELSGGTAIVAEMDNPKAEELVFSANFACPHCGYSVPELEPRLFSFNNPAGACPTCDGLGVQQYFDEDRVVQNPTISLAGGAVKGWDRRNFYYYQMLTSLAKHYHFDVEAPYESLPKKIQHIIMHGSGKEEIEFQYMNDRGDVVIRKHPFEGILNNMARRYKETESMSVREELAKNISNRPCIDCGGSRLRPEARNVYIGRTNLPIIAEKSIGETLEFFTALSLTGQKAQIAEKILKEIRERLQFLVNVGLNYLSLSRSAETLSGGEAQRIRLASQIGAGLVGVMYVLDEPSIGLHQRDNERLLNTLIHLRNLGNTVIVVEHDEDAIRAADHIIDIGPGAGVHGGQVIAQGNADEIMLNPNSITGKFLSGADKIEIPKKRTALDKKKWLKLKGASGNNLKNVNLDIPVGLFTCVTGVSGSGKSTLINDTLFPLAQNALNRAEKTDYAPYQSIEGLEHFDKVIDINQSPIGRTPRSNPATYTGLFTPIRELFAGVPEARARGYNPGRFSFNVRGGRCEACQGDGVLKVEMHFLPDVYVPCDQCKGKRYNRETLEIRYKGKTIHQVLDMTVEEAREFFDAIPMIARKLQTLMDVGLSYIRLGQSSTTLSGGEAQRVKLATELSKRDTGKTLYILDEPTTGLHFADIKQLLEVLHRLRDQGNTIVVIEHNLDVIKTADWIVDLGPEGGSGGGQIIATGTPEQVAKVTSSHTARFLKPILEKP

SEQ ID NO: 10995 - protein, 168 aa, Haemophilus influenzae
MAGINKVIIVGHLGNDPEIRTMPNGDAVANISVATSESWNDRNTGERREVTEWHRIVFYRRQAEICGEYLRKGSQVYVEGRLKTRKWQDQNGQDRYTTEIQGDVMQMLGGRNQNAGGYGNDMGGAPQSSYQARQTNNGNSYQSSRPAPQQAAPQAEPPMDGFDDDIPF

SEQ ID NO: 10996 - protein, 195 aa, Haemophilus influenzae
MKQKIVLATGNKGKVKEMADVLSDFGFEVIAQTDLGIESPEETGLTFVENALLKARYASEKSGLPAIADDSGLVVSALNGAPGLYSARYAGEEGNDAKNREKLLAELAHIAQEQRQAKFVSCIVFLQHPTDPSPIIAEGECCGVIGFEEKGENGFGYDSLFFSPEQGCTFAELETAEKKKISHRAKALSVLKSKL

SEQ ID NO: 10997 - protein, 199 aa, Haemophilus influenzae
MSLFALFYMLFAYLLGSISSAILICRIAGLPDPRQNGSHNPGATNVLRIGNRKSALAVLIFDMLKGMIPVWAGYYLGLTQFELGMVALGACLGHIFPIFFQFKGGKGVATAFGAIAPISWAVAGSMFGTWIFVFLVSGYSSLSAVISALLVPFYVWWFKPEFTFPVALVCCLLIYRHHDNIQRLWRGQEDKVWAKFKKK

SEQ ID NO: 10998 - protein, 341 aa, Haemophilus influenzae
MQNLQPFHTFHIQSNAREIIEAHSIEQLQQVWANSKSENLPTLFLGQGSNVLFLDDFNGIVILNRLMGITHEQDANFHYLHVNGGENWHKLVEWSINNGIYGLENLALIPGCAGSAPIQNIGAYGVEFKDVCDYVEVLNLNTNETFRLDTEQCEFGYRESIFKHRYQQGYVITAVGLKLKKDWQPILKYGSLVEFDPKTVTAKQIFDEVCHIRQSKLPDPNEVGNAGSFFKNPVVSSEHFEEIKKHHENLPHFPQADGSVKLAAGWLIDQCNLKGFQIGGAAVHKKQALVLINKNGATGQDVVKLAHHVRQTVAEKFGVYLQPEVRFISATGEVNSEQIIT

SEQ ID NO: 10999 - protein, 480 aa, Haemophilus influenzae
MKLDAPFNLDPNVKVRTRFAPSPTGYLHVGGARTALYSWLYAKHNNGEFVLRIEDTDLERSTPEATAAIIEGMEWLNLPWEHGPYYQTKRFDRYNQVIDEMIEQGLAYRCYCTKEHLEELRHTQEQNKEKPRYDRHCLHDHNHSPDEPHVVRFKNPTEGSVVFDDAVRGRIEISNSELDDLIIRRTDGSPTYNFCVVVDDWDMGITHVVRGEDHINNTPRQINILKAIGAPIPTYAHVSMINGDDGQKLSKRHGAVSVMQYRDDGYLPEALINYLVRLGWGHGDQEIFSREEMINYFELDHVSKSASAFNTEKLQWLNQHYIRELPPEYVAKHLEWHYKDQGIDTSNGPALTEIVTMLAERCKTLKEMARSSRYFFEEFETFDEAAAKKHFKGNAAEALAKVKEKLTALSSWDLHSIHEAIEQTAAELEVGMGKVGMPLRVAVTGSGQSPSMDVTLVGIGRDRVLARIQRAIDFIHAQNA

SEQ ID NO: 11000 - protein, 722 aa, Haemophilus influenzae
  VARIANT (1)...(722): Xaa = Any Amino Acid
MLDLTPQSKKISIQIGGMTCQSCANRIEKVLNKKPFVQQAGVNFAAEEAQVVFDATQASEAQIIEIIHKTGFSAHIKQANELPIEENTSIPWRLIVLWIINIPFLIGMLGMIGGSHNLMLPPIWQFALASIVQLWLAIPFYRGAIGSIRGGLTNMDVLVSTGTLTIYLYSAFMLFYHANHAMGHVYFEASVMVIGFVSLGKFLEDRTKKHSLNSLSMLLQLTPKKVTVLRNEKWIEIALDQVNIGEIIRANQGERIAADGVIESGNGWCDESHLTGESRPEEKQKGGKVLAGAMVTEGSIIYRANQLGSQTLLGDMMNALSDAQGSKAPIARFADKVTSVFVPVVLVISLVTFALTYILTNDSVSSLIHAVSVLVIACPCALGLATPAAIMVGLGKAVNAGVWFKDAAAMEETAHVDTVVLDKTGTLTKGELEISALWQPQSAVYSEDDLYRFAAAVERQANHPIAKAIVQAAEXKMLEIPTALFSKMEVGQGIQAELEQVGTIKVGKPDYCGLILPKNLEDIWQIASIVAVSINDEPIGAFALTDTLKNDSLHAIQRLQQQNIDVVIMSGDQQSVVDYIAKQLGIKKAFGKLTPRDKAEQIQKLKDLGHIVAMVGDGINDAPALASANVSFAMKSSSDIAEQTASATLMQHSVNQLVDALFIARATLKNIKQNLFFALIYNILGIPLAAFGFLSPIIAGAAMALSSISVLMNALRLKKVRF

SEQ ID NO: 11001 - protein, 420 aa, Haemophilus influenzae
MHLTELKNTPVSDLVKLGEEQMGLENLARLRKQDIVFAILKQHAKSGEDIFGGGVLEILPDGFGFLRSADSSYLAGPDDIYVSPSQIRRFNLQTGDKIEGKIRPPKEGERYFALLKVDQVNDDKPEVSRSKILFENLTPLHANSRLRMERGNGSTEDLTARILDLASPIGKGQRGLIVAPPKAGKTMLLQNIAQSITHNYPDVELIVLLIDERPEEVTEMQRSVKGEVIASTFDEPATRHVQVAEMVIEKAKRSVEHKKDVVILLDSITRLARAYNTVTPASGKILSGGVDANALHRPKRFFGAARNVEEGGSLTIIATALVDTGSKMDEVIFEEFKGTGNMELHLSRKIAERRVFPAIDFKRSGTRKEDLLTTADELQKMWILRKILNPMDEVDAMEFLIDKLMMAKTNEEFFEVMKRS

SEQ ID NO: 11002 - protein, 522 aa, Haemophilus influenzae
MKNLNRILLSIKFMNKYFTYLIAIISGLLGVFAFSPFDYWPLAYVSLLGLLYVAKNPKKSTALLSTFLWAMGFFCFGVSWLNVSIHQFGGASLGVSYFLVGLLAAYLALYPMLFTYLVHHFKVQSAVIFAVIWTLTEFLRGWIFTGFPWLQFGYTQIDSPFYGIAPIFGVTGLTFFTVWASAVIFNLVSSLFKTKNLKLVLANALLLIIVGGLSAYSSRIHFVKSVEDKAISVTLAQGNIEQNLKWDPNYFYSTLAIYQKLITENLGKTDLIILPESALPTLENAITPFFEGLERAAKETKTEIMVGTVFQDTKSGKLLNSIMTAGNPDFPYQPNTQNRYNKHHLVPFGEYVPLESILRPLNSVFNLPMSAFQSGEAVQPSLIAKKRAFSPAICYEIIFGEQVRQNLKQDTDYLLTLSNDAWFGDSIGPWQHLQMARMRALELGKPLIRATNTGISVFVDAQGKVLAQAPQFIETTLTYKIAPAEGKTPYSVLGNMPLYALSLLFLLLHSMMAFIRRKMNIL

SEQ ID NO: 11003 - protein, 245 aa, Haemophilus influenzae
MRIPRIYHPISLENQTQCYLSEDAANHVARVLRMTEGEQLELFDGSNHIYPAKIIESNKKSVKVEILGRELADKESHLKIHLGQVISRGERMEFTIQKSVELGVNVITPLWSERCGVKLDAERMDKKIQQWQKIAIAACEQCGRNIVPEIRPLMKLQDWCAENDGALKLNLHPRAHYSIKTLPTIPAGGVRLLIGSEGGLSAQEIAQTEQQGFTEILLGKRVLRTETASLAAISALQICFGDLGE

SEQ ID NO: 11004 - protein, 297 aa, Haemophilus influenzae
MKNLALIDLFLNEYWIEKGLSENTVQSYRLDLTALCDWLDKNDLSLETLDAVDLQGFLGERLEKGYKATSTARMLSAMRKLFQYLYREKYRVDDPSAVLSSPKLPSRLPKYLTEQQVSDLLNTPNVEVPLELRDKAMLELLYATGLRVTELVSLTIENMSVQQGVVRVIGKGNKERIVPMGEEAAYWVRQFMLYGRPVLLNGQSSDVVFPSQRAQQMTRQTFWHRVKHYAILADIDADALSPHVLRHAFATHLVNHGADLRVVQMLLGHTDLSTTQIYTHVAKERLKRLHERFHPRG

SEQ ID NO: 11005 - protein, 588 aa, Haemophilus influenzae
MMRTHYCGALNRNNIGQDVTLSGWVHRRRDLGGLIFIDMRDRDGIVQVCFDPKYQDALTAAAGLRNEFCIQIKGEVIARPDNQINKNMATGEVEVLAKELRIYNASDVLPLDFNQNNTEEQRLKYRYLDLRRPEMAQRLKTRAKITSFVRRFMDDNGFLDIETPMLTKATPEGARDYLVPSRVHKGKFYALPQSPQLFKQLLMMSGFDRYYQIVKCFRDEDLRADRQPEFTQIDVETSFLTAPEVREIMERMVHGLWLDTIGVDLGKFPVMTWQEAMRRFGSDKPDLRNPLEMVDVADIVKDVEFKVFNEPANNPNGRVAVIRVPNGAEITRKQIDEYTQFVGIYGAKGLAWAKVNDINAGLEGVQSPIAKFLNEDVWKGLAERVNAQTGDILFFGADKWQTTTDAMGALRLKLGRDLGLTRLDEWQPLWVIDFPMFERDEEGNLAAMHHPFTSPKDFSPEQLEADPTSAVANAYDMVINGYEVGGGSVRIFDPKMQQTVFRILGIDEEQQREKFGFLLDALKFGTPPHAGLAFGLDRLTMLLTGTENIRDVIAFPKTTAAACLMTEAPSFANPQALEELAISVVKAE

SEQ ID NO: 11006 - protein, 743 aa, Haemophilus influenzae
MVAVRGSHLLNPQDFVIEQWCTGLKLAEQTEKSLIDAWYYARDLMNAYPDEMKNATLMLQSGVEMVEILHELNMDAETLLTAMLFPIVANKLTDWESLKEKFGAKITKLLKGVLEMDNIRQLNASHSANALQVDNVRRMLLAMVDDFRCVIIKLAERITFLRDAEHRCAEEDKVLAVKECSYIYAPLANRLGIGQLKWELEDYCFRYLHPEQYRAIAKLLQERRLDREHYIADFVSELSGYLRENIEQVEVYGRPKHIYSIWRKMQKKHLEFSGLYDVRAVRIIVQKLQDCYTALGIVHTQFKHLPKEFDDYVANPKPNGYQSIHTVVLGKGGKPIEVQIRTQQMHDDAELGMAAHWKYKEGNTGSMSAYEEKIAWLRKLLAWQDDITDSGEVLAELRSQVFDDRVYVFTPKGEVVDLPTGSTPLDFAYAIHSEIGHRCIGAKVAGRIVPFTYQLQMGDQIDIITQKNPNPSRDWLNPNLGFTHTAKSRAKIQAWFKKQDRDKNIPAGKELLDNELALLNLSIKQVEPYALPRYNLKNLDDLYAGIGSGDIRLNNLIHFLQSKLIKVTAEEADQEILRHVANKSAVNSQQKSEKNNGCVIVEGVDNLMHHIARCCQPIPGDAIVGYITMGRGISIHRADCEQFLDLQAAHPERVVESIWGENYASGFHINIRIVAGDRNGLLRDITTVLANEKISVLGVSSRADTKKQLATIDMEIELHNVESLSKILARLAKLDDVIEAKRL

SEQ ID NO: 11007 - protein, 197 aa, Haemophilus influenzae
MTALLKIGLVSVSDRASAGVYQDQGIPELQAWLEQALVDPFHLETRLIPDEQPVIEQTLKELVDEQGCHLVLTTGGTGPAKRDVTPDATLAVADREMPGFGEQMRQVSLHFVPTAILSRQVGVIRKESLILNLPGQPKAIKETLEGVKDKEGNVLVKGIFSAVPYCLQLINGLYIDTKPEIIESFRPKSARRENLEK

SEQ ID NO: 11008 - protein, 214 aa, Haemophilus influenzae
MKIILLGAPGAGKGTQAQFIMNKFGIPQISTGDMFRAAIKAGTELGKQAKALMDEGKLVPDELTVALVKDRIAQADCTNGFLLDGFPRTIPQADALKDSGVKIDFVLEFDVPDEVIVERMSGRRVHQASGRSYHIVYNPPKVEGKDDVTGEDLIIRADDKPETVLDRLAVYHKQTSPLIDYYQAEAKAGNTQYFRLDGTQKVEEVSQELDKILG

SEQ ID NO: 11009 - protein, 306 aa, Haemophilus influenzae
MDSFSTSIWVNDVTVRYNNGHTAIHNMTFSLNSGTICALVGVNGSGKSTLFKSIMGLVKPQQGEIKLCDLPISQALKRNLVAYVPQSEEVDWQFPVSVYDVVMMGRYGYMNFLRIPKAIDKQKVQEAMQRVNIEHLAHRQIGELSGGQKKRVFLARALAQQSPIILLDEPFTGVDVKTENAIVDLLQQLREEGHLILVSTHNLGSVPDFCDQVVMINRTVIAAGKTEDTFNQHNLEIVFGGVLRHIKLLGENLHNDEDKRSVTVLTDDEKAVVFYGETKQDPPAPTTQNCHFEDCPYKSAVKNKRD

SEQ ID NO: 11010 - protein, 423 aa, Haemophilus influenzae
MAKTIQAIRGMNDCAPTESPLWQWIEAQVRNVLNSYGYSEVRMPIVESTPLFARAIGEVTDVVSKEMYTFWDNDEQLTLRPEGTAGCVRAAIEHGWIYNNEQRLWYIGPMFRHERPQKGRYRQFHQVGVEVFGIANPEIDAELIMLTYRLWKALGIDQHVTLQLNSIGSLEARANYRSALVGFLENHQDLMSDEEKERLVRNPLRILDTKNPELQKVLDNAPKLLDYLDDESRTHFEQLCSLLDAVGIQYEINPKLVRGLDYYNKTVFEWVTSALGAQGTVCGGGRYDGLVEQLGGHATPSIGFAMGLERLVLLVQEVNPNVPAKSAVDIYVVYQGEGATLAAFELAEKVRSELPHLNTMLHCSSGNFKKQFKRADKSGATLALVIGESEVQNKQVVVKHLQGGTDQQTLDLVNIIDYLQTQF

SEQ ID NO: 11011 - protein, 363 aa, Haemophilus influenzae
MGFKCGIVGLPNVGKSTLFNALTKAGIEAANYPFCTIEPNTGVVPMPDPRLDALAEIVKPERILPTTMEFVDIAGLVAGASKGEGLGNKFLANIRETDAIGHVVRCFENDDIVHVAGKIDPLDDIDTINTELALADLDSCERAIQRLQKRAKGGDKEAKFELSVMEKILPVLENAGMIRSVGLDKEELQAIKSYNFLTLKPTMYIANVNEDGFENNPYLDRVREIAAKEGAVVVPVCAAIESEIAELDDEEKVEFLQDLGIEEPGLNRVIRAGYALLNLQTYFTAGVKEVRAWTVSVGATAPKAAAVIHTDFEKGFIRAEVIAYEDFIQFNGENGAKEAGKWRLEGKDYIVQDGDVMHFRFNV

SEQ ID NO: 11012 - protein, 439 aa, Haemophilus influenzae
MSDNIYSVSQLNSAARQMLEGNFCQIWLTGEISNFTQPVSGHWYLTLKDENAQVRCAMFRMKNLRVAFRPQNGMQVLVRANVSLYEPRGDYQLIIDSMHPAGEGLLQQQFEALKMKLAAEGLFAQNLKKTLPHFSKAVGIITSSTGAALQDILHILARRDPSLKVVIYPTAVQGKEATAEIVQMIELANARQEVDVLIVGRGGGSLEDLWCFNEEEVARAIFRSTLPIISAVGHETDVTIADFVADLRAPTPSAAAELVSRNQDELLQQLRHQQQRLDMAFDRLFTRKSQRLKQLALRLQNQHPQNQLRAQQAKNEQLTHRLQLAILRQFENTQQKFTALSVRLKQNPLPYRIQRYQQGLEQLKVRLNFCVNRQVTERQNKLATLCGKLDGLSPLKVLARGYSIAENPQGKAIVSVKDVNQGDFITTQVADGKIVSKVL

SEQ ID NO: 11013 - protein, 190 aa, Haemophilus influenzae
MCFSFYKTRRKMTALYYTYYPSPVGRLLILSDGESITHIDFEKEQYAPNPKWHKQDELPVFQKVRLAFERYFNGEVECFSNIPLKPEGTAFQQAIWQALREIDYGELSTYGELALRINNPKAVRAVGGAVGSNPISIIIPCHRILGKDRTLTGFGGGLEAKRFLLQLEKIPYIDKGTENTKPRFFKKYHE

SEQ ID NO: 11014 - protein, 315 aa, Haemophilus influenzae
MNQEYLDFELPIAELEAKIEALRAASDDKVDLTDEIKRLQKKSNELTKKTFANLDAWQVSRMARHPNRPYTLDYIEHIFTEFEELAGDRAFADDKAIVGGLARLDGRPVMVIGHQKGRSVKEKVQRNFGMPAPEGYRKALRLMEMAERFKLPIITFIDTPGAYPGIGAEERGQAEAIARNLREMAQLTVPVICTVIGEGGSGGALAIGVGDKVNMLQYSTYSVISPEGCASILWKSAEKASTAAEVMGLTASRLKELNLIDSIVQEPLGGAHRSYLEIAENLKLRLKEDLAELDELSKEELLNRRYERLMSYGYC

SEQ ID NO: 11015 - protein, 265 aa, Haemophilus influenzae
MLMQSIYLSKIREQNPLIHNITNIVAANFSANGLLALGASPLMSANVEEMQEVPKISQALVINIGTLIGKDREAMLQAGKTANEVGIPVVLDPVGVGATSYRRETIRELLAEVKFALIRGNAGELAAIAGETWQAKGVDAGQGEVDLKAVAEKVAQRYGCTVLISGAVDIVSDGTQTATVHNGTSLFPKVTASGCLLSAVCAAFLAVSEGNYFSATLEACVAYTIAGECAAQGLTTQVGQFQIRLLDELAALSPETIGQRGRINE

SEQ ID NO: 11016 - protein, 226 aa, Haemophilus influenzae
MKNIQKILPLYFVAGTQDCRHLGENLSENLLFVLKQALEGGITCFQFRDKGKFSLEHTPSAQKALAINCRDLCREYGVPFIVDDNVDLALEIEADGIHVGQSDMPVQEIRAKTDKPLIIGWSVNRLDEAKIGENLAEIDYFGIGPIFPTQSKENPKPTLGMAFIQTLRNAGITKPLVAIGGVKLAHVKTLREFGADGVAVITAITHADNVQAATKALREASDEYAK

SEQ ID NO: 11017 - protein, 460 aa, Haemophilus influenzae
MTTQFKPELLSPAGSLKNMRYAFAYGADAVYAGQPRYSLRVRNNEFNHANLKIGIDEAHSLGKKFYVVVNIAPHNSKLKTFIKDLQPVIDMKPDALIMSDPGLIMLVRENFPNIDIHLSVQANAVNWATVKFWKQMGLTRVILSRELSIDEIAEIRQQVPDIELEIFVHGALCMAYSGRCLLSGYINKRDPNQGTCTNACRWEYKMEEGTTDDVGNIVPKIDPAQQIEVKNVAPTLGEGAVTDKVFLYTESQKPDEQMTAFEDKHGTYFMNSKDLRAVQHVEKLTALGVHSLKIEGRTKSFYYCARTAQVYRKAIDDAAAGKPFDESLMDTLESLAHRGYTEGFLRRHTHDEYQNYEYGYSISDRQQFVGEFTGKRNEQGMAEVAVKNKFLLGDNVEMMTPQGNINFKIEKMLNRKNETVDAALGDGHFVFLNVPQDINLNYALLMRNLVNTNTRNPHSN

SEQ ID NO: 11018 - protein, 610 aa, Haemophilus influenzae
MCGIVGAVAQRDVAEILINGLHRLEYRGYDSAGVAVINKQNELQRIRCLGKVKALDEAVSEKPLIGGTGIAHTRWATHGEPSETNAHPHSSGTFAVVHNGIIENHEELRELLKSRGYVFLSQTDTEVIAHLVEWEMRTTDSLLDAVKKAVKQLTGAYGMVVMDSRHPEHLVAARSGSPLVIGLGIGENFLASDQLALLSVTRRFIFLEEGDIAEITRRTVDIYDTHGNKAKREIHESNLENDAAEKGKFRHFMQKEIYEQPTALINTMEGRINHENVIVDSIGNGAKGILEKVEHIQIVACGTSYNAGMVARYWFESLAGVSCDVEIASEFRYRKFVTRPNSLLITLSQSGETADTLAALRLAKEKGYMAALTICNVAGSSLVRESDLAFMTRAGVEVGVASTKAFTTQLAALLMLVTALGKVKGHISVEKEREIIKAMQSLPAEIEKALAFDTEIEALAEDFAEKHHALFLGRGAFYPIAVEASLKLKEISYIHAEAYAAGELKHGPLALIDADMPVIVVAPNNELLEKVKSNIEEVRARGGQLYVFADKEAGFTPSEGMKIITMPKVNDIVAPIFYTIPMQLLSYYVALIKGTDVDQPRNLAKSVTVE

SEQ ID NO: 11019 - protein, 136 aa, Haemophilus influenzae
MRFVTIFRNPAFNSSQVRLSFAQFLRQIRKDTFKESNFLFNRRYKFMNKTDLIDAIANAAELNKKQAKAALEATLDAITASLKEGEPVQLIGFGTFKVNERAARTGRNPQTGAEIQIAASKVPAFVSGKALKDAIK

SEQ ID NO: 11020 - protein, 121 aa, Haemophilus influenzae
MHAIFDLIKDNIMFGKGGLGGLMKQAQQMQEKMQKMQEEIAQLEVTGESGAGLVKITINGAHNCRRIDIDPSLMEDDKEMLEDLIAAAFNDAVRRAEELQKEKMASVTAGMPLPPGMKFPF

SEQ ID NO: 11021 - protein, 200 aa, Haemophilus influenzae
MQSSPLLEHLIENLRCLPGVGPKSAQRMAYHLLQRNRSGGMNLARALTEAMSKIGHCSQCRDFTEEDTCNICNNPRRQNSGLLCVVEMPADIQAIEQTGQFSGRYFVLMGHLSPLDGIGPREIGLDLLQKRLVEESFHEVILATNPTVEGDATANYIAEMCRQHNIKVSRIAHGIPVGGELETVDGTTLTHSFLGRRQID

SEQ ID NO: 11022 - protein, 651 aa, Haemophilus influenzae
MRLFIAEKPSLARAIADVLPKPHQRGDGFIKCGDNDVVTWCVGHLLEQAEPDAYDPKFKQWRLEHLPIIPEKWQLLPRKEVKKQLSVVEKLIHQADTLVNAGDPDREGQLLVDEVFSYANLSAEKRDKILRCLISDLNPSAVEKAVKKLQPNRNFIPLATSALARARADWLYGINMTRAYTIRGRQTGYDGVLSVGRVQTPVLGLIVRRDLEIEHFQPKDFFEVQAWVNPESKEEKTPEKSTALFSALWQPSKACEDYQDDDGRVLSKGLAEKVVKRITNQPAEVTEYKDVREKETAPLPYSLSALQIDAAKRFGMSAQAVLDTCQRLYETHRLITYPRSDCRYLPEEHFAERHNVLNAISTHCEAYQVLPNVILTEQRNRCWNDKKVEAHHAIIPTAKNRPVNLTQEERNIYSLIARQYLMQFCPDAEYRKSKITLNIAGGTFIAQARNLQTAGWKELLGKEDDTENQEPLLPIVKKGQILHCERGEVMSKKTQPPKPFTDATLLSAMTGIARFVQDKELKKILRETDGLGTEATRAGIIELLFKRGFLTKKGRNIHSTETGRILIQALPNIATQPDMTAHWESQLTDISQKQATYQQFMHNLNQILPDLVRFVDLNALRQLSRIKMIKSDRAKPKSAVKKSSKSNGETD

SEQ ID NO: 11023 - protein, 556 aa, Haemophilus influenzae
MKLFLTQSANVGDVKAYLLHEVFRAAAQKANVSIVGTPAEADLVLVFGSVLPNNPDLVGKKVFIIGEAIAMISPEVTLANALANGADYVAPKSAVSFTGVSGVKNIVAVTACPTGVAHTFMSAEAIEAYAKKQGWNVKVETRGQVGAGNEITVEEVAAADLVFVAADIDVPLDKFKGKPMYRTSTGLALKKTEQEFDKAFKEAKIFDGGNNAGTKEESREKKGVYKHLMTGVSHMLPLVVAGGLLIAISFMFSFNVIENTGVFQDLPNMLINIGSGVAFKLMIAVFAGYVAFSIADRPGLAVGLIAGMLASEAGAGILGGIIAGFLAGYVVKGLNVIIRLPASLTSLKPILILPLLGSMIVGLTMIYLINPPVAEIMKELSNWLTSMGEVNAIVLGAIIGAMMCIDMGGPVNKAAYTFSVGLIASQVYTPMAAAMAAGMVPPIGMTVATWIARNKFTVSQCDAGKASFVLGLCFISEGALPFVAADPIRVIISSVIGGAVAGAISMGLNITLQAPHGGLFVIPFVSEPLKYLGAIAIGALSTGVVYAIIKSKNNAE

SEQ ID NO: 11024 - protein, 313 aa, Haemophilus influenzae
MASVVTITLNAAYDLVGRLNRIQLGEVNTVETLGLFPAGKGINVAKVLKDLGVNVAVGGFLGKDNSADFEQMFNQHGLEDKFHRVDGKTRINVKITETEADVTDLNFLGYQISPQVWQQFVTDSLAYCLNYDIVAVCGSLPRGVSPELFADWLNQLHQAGVKVVLDSSNAALTAGLKAKPWLVKPNHRELEAWVGHPLNSLEEIIAAAQQLKAEGIENVIISMGAKGSLWINNEGVLKAEPAQCENVVSTVGAGDSMVAGLIYGFEKGLSKTETLAFATAVSAFAVSQSNVGVSDLSLLDPILEKVQITMIEG

SEQ ID NO: 11025 - protein, 499 aa, Haemophilus influenzae
MLELSESNIHLNANAIDKQQAIEMAVSALVQAGNVENGYLQGMLARELQTSTFLGNGIAIPHGTLDTRLMVKKTGVQVFQFPQGIEWGEGNIAYVVIGIAARSDEHLSLLRQLTHVLSDEDTAAKLAKITDVAEFCAILMGETIDPFEIPAANISLDVNTQSLLTLVAINAGQLQVQSAVENRFISEVINNAALPLGKGLWVTDSVVGNVKNALAFSRAKTIFSHNGKAVKGVITVSAVGDQINPTLVRLLDDDVQTTLLNGNSTEILTALLGSSSDVETQSVEGAVVGTFTIRNEHGLHARPSANLVNEVKKFTSKITMQNLTRESEVVSAKSLMKIVALGVTQGHRLRFVAEGEDAKQAIESLGKAIANGLGENVSAVPPSEPDTIEIMGDQIHTPAVTEDDNLPANAIEAVFVIKNEQGLHARPSAILVNEVKKYNASVAVQNLDRNSQLVSAKSLMKIVALGVVKGTRLRFVATGEEAQQAIDGIGAVIESGLGE

SEQ ID NO: 11026 - protein, 260 aa, Haemophilus influenzae
  VARIANT (1)...(260): Xaa = Any Amino Acid
MFIVDSHCHLDALDYENLHKNISDVVEKAHARDVKHLLAIGVTLSRFEQAYDSLREFNNVSLACGVHPLDFEEEPYDAERLLRLAQDPKVIAIGEIGLDYYYSADNKAAQQAVFGSQIDIANQLDKPVIIHTRSAGDDTIAMLRQHRAEKCGGVIHCFTETMEFXKKALDLGFYISCSGIVTFKNAEAIREVIRYVPMERLLVETDSPYLAPVPYRGKENQPAYTREVCEYVATLKGVSAEAFAQITTQNFERLFKIRVE

SEQ ID NO: 11027 - protein, 210 aa, Haemophilus influenzae [sequence omitted]

SEQ ID NO: 11028 - protein, 410 aa, Haemophilus influenzae
MTNKVSLDKSKIKFVLFEGVHQSALDTLHAAGYTNIDYYKKALDGDELKEAIKDVHFIGLRSRTHLTAEMIEAAPKLIAVGCFCIGTNQVDLNAAKARGIPVFNAPFSNTRSVAELVLGEILLLMRNVPQANAEVHRGVWNKSATGSHEVRGKKLGIIGYGHIGSQLSIIAESLGMDVYFYDIENKLPLGNAKQVRSLEELLSSCDVVSLHVPELPSTKNLMNVARIAQLKQGAILINAARGTVVDIDALAQALKDGKLQGAAIDVFPVEPASINEEFISPLREFDNVILTPHIGGSTAEAQENIGFEVAGKFVKYSDNGSTLSSVNFPEVSLPEHEGTKRLLHIHENRPGILNKLNQIFVEANLNIAAQYLQTDPKIGYVVVDVETNDASPLLTKLKEIDGTIRARVLY

SEQ ID NO: 11029 - protein, 513 aa, Haemophilus influenzae
MQLNSTEISELIKKRIAQFDVVSEARNTGTIVSVSDGIIRIHGLSDVMQGEMIALPGNRYAMALNLERDSVGAVVMGPYADLAEGMEVQCTGRILEVPVGRGLLGRVVNTLGQPIDGKGEIENDGFSPVEVIAPGVIDRRSVDQPVQTGYKAVDSMVPIGRGQRELIIGDRQTGKTALAIDAIINQRNSGIKCIYVAIGQKASTIANVVRKLEEHGALANTIVVAASASESAALQYLAPYAGCAMGEYFRDRGEDALIVYDDLSKQAVAYRQISLLLRRPPGREAYPGDVFYLHSRLLERASRVNEDYVEKFTKGEVKGKTGSLTALPIIETQAGDVSAFVPTNVISITDGQIFLESNLFNSGIRPAVNPGISVSRVGGSAQTKVIKKLAGGIRTALAQYRELAAFAQFASDLDDATRKQLSHGEKVTELLKQKQFTPLSVAEQAVILFAVEFGYLDDVELSKIASFETALLDYSNRNHAEFMQELNKTGNYNDEIKDTLKSILDGFKANSAW

SEQ ID NO: 11030 - protein, 262 aa, Haemophilus influenzae
MSGQTTSEYISHHLSFLKTGDGFWNVHIDTLFFSILAAVIFLFVFSRVGKKATTGVPGKMQCLVEIVVEWVNGIVKENFHGPRNVVAPLALTIFCWVFIMNAIDLIPVDFLPQFAGLFGIHYLRAVPTADISATLGMSICVFFLILFYTIKSKGFKGLVKEYTLHPFNHWAFIPVNFILETVTLLAKPISLAFRLFGNMYAGELIFILIAVMYSANMAIAALGIPLHLAWAIFHILVITLQAFIFMMLTVVYLSIAYNKADH

SEQ ID NO: 11031 - protein, 203 aa, Haemophilus influenzae
MKAKLVSLLAQANIKISDQQIQQLINLVNLLNKWNKAYNLTSVRDPQEMLVKHILDSLVVSPYLQGDRFIDVGTGPGLPGLPLAIINPSKQFVLLDSLGKRISFIRNAIRELRLTNVTPVLSRVEEYQPEDKFDGVLSRAFASLKDMTDWCHHLPKENGYFYALKGIYQEDEINELNKKYTIQKVIELSVPELIGERHLIVLR

SEQ ID NO: 11032 - protein, 175 aa, Haemophilus influenzae
MTTIVSVRRNGQVVVGGDGQVSLGNTVMKGNARKVRRLYNGKVLAGFAGGTADAFTLFELFERKLEMHQGHLLKSAVELAKDWRTDRALRKLEAMLIVADEKESLIITGIGDVVQPEEDQILAIGSGGNYALSAARALVENTELSAHEIVEKSLRIAGDICVFTNTNFTIEELPN

SEQ ID NO: 11033 - protein, 431 aa, Haemophilus influenzae
MLNFAYQEHVRSYYFDSRNQDFQFPPLTQIEHADVCVIGAGFFGLSAALELAEKGKKVIVLEGARVGFGASGRSGGQAINGFEEGIDEYIKQVGEDKAHKLWNMSLETIDIIDERIEKYSIQCDWKKGYATLALNERRMDDLIEMEKESHKNFGYQNMQLWDKTKLKQHLGSDIYVGGLFDSNSGHLHPLNYCLGLAKACVDLGVQIFEQSPVVDMVEKNGCVEVKTAKSAVISQDVILATNAYIDVLPKSIHHGINRKILPVESFIIATEPLSQAVADSVINNGMSVCDNNLLLDYYRLSADNRLLFGSDSSSEKDMVAIMRKNMLCVFPQLENVKIDYGWAGPIDMTLNSTPHFGRISPHIYFAHGYSGHGVALTGLAGRIVAEAILGDDERLSIFEGLKVPSVYGGRIIKDLATKIGVQYYKFLDKYR

SEQ ID NO: 11034 - protein, 323 aa, Haemophilus influenzae
MMKNETSNFQIGRFLIEQRSFIALIILIAIVSMINPDFFSVDNILNILRQTSVNAIIAVGMTFVILIAGIDLSVGSVLALTGAIAASMVSIELPIFLVIPVVLLIGTLLGGISGVIVAKGKVQAFIATLVTMTLLRGITMVYTDGRPITTGFSDNADLFASIGTGYVLGIPVPIWIMSIVFAVAWYILKDTPIGRYIYALGGNEAATQLSGINVNKIKVFVFAVSGFLSALAGLIVTSRLSSAQPTAGVSYELDAIAAVVVGGTSLMGGKGRVMGTLIGALIIGFLNNALNLLDISSYYQMIAKALVILVAVLADNYLGTKKL

SEQ ID NO: 11035 - protein, 306 aa, Haemophilus influenzae
MRKTLTVLGSINADHVISVPYFTKPGETLTGQNYQIAYGGKGANQAVAAARLGAKVAFISCIGSDSIGKTMKNAFAQEGIDTTHINTVSQEMTGMAFIQVAKSSENSIVLASGANSHLSEMVVRQSEAQIAQSDCLLMQLETPLSGVELAAQIAKKNGVKVVLNPAPAQILSDELLSLIDIITPNETEAEILTGVEVADEQSAVKAASVFHDKGIETVMITLGAKGVFVSRKGKSRIIKGFCVQAIDTTAAGDTFNGGFVTALLEEKSFDEAIRFGQAAAAISVTKKGAQSSIPTRQETLEFLEHA

SEQ ID NO: 11036 - protein, 1415 aa, Haemophilus influenzae
MKDLVKFLKAQSKTSEDFDVIKIGLASPDMIRSWSFGEVKKPETINYRTFKPERDGLFCARIFGPVKDYECLCGKYKRLKHRGVICEKCGVEVTQTKVRRERMGHIELASPVAHIWFLKSLPSRIGLLLDMPLRDIERVLYFEMYIVTEPGMTDLERGQLLTEEQYLDAEDRWQDEFEAKMGAEAIQDLLKGMDLEAECEKLREELQETNSETKRKKITKRLKLLEAFVQSGNKPEWMVMTVLPVLPPDLRPLVPLDGGRFATSDLNDLYRRVINRNNRLKRLLDLIAPDIIVRNEKRMLQESVDALLDNGRRGRAITGSNRRPLKSLADMIKGKQGRFRQNLLGKRVDYSGRSVITVGPYLHLHQCGLPKKMALELFRPFIYAKLESRGYATTIKAAKKMVEREDAIVWDILAEVIREHPILLNRAPTLHRLGIQAFEPILIEGKAIQLHPLVCAAFNADFDGDQMAVHVPLTLEAQLEARALMMSTNNVLSPANGDPIIVPSQDVVLGLYYMTREKVNGKGEGMLLQDPREAEKAYRTGEAELHSRVKVRITEYVKNEAGEFDAKTTLTDTTIGRAILWMIAPKGMPYSLFNQTLGKKAISKLINEAYRRLGLKEAVMFADQIMYTGFAYAARSGSSVGIDDMEIPAKKYEIISAAEEEVAEIQEQFQSGLVTAGERYNKVIDIWAAANERVAKAMMENLSQEEVINREGNPEKQASFNSIFMMADSGARGSAAQIRQLAGMRGLMARPDGSIIETPITANFREGLNVLQYFISTHGARKGLADTALKTANSGYLTRRLVDVAQDLVIVEDDCGTHEGLVMTPLIEGGDEKVPLRELVLGRVAAEDILKPGTEEVLIPRNTLLDEKLCDVLDANSVDSVKVRSVVTCDTDFGVCAKCYGRDLARGHLINQGEAVGVIAAQSIGEPGTQLTMRTFHIGGAASAAAKESSVQVKNTGTVHLMNAKFVTNDESKLVLTSRNTELTITDAFGRTKEHYKVPYGAVLSKGDGQEVTAGETIANWDPHTMPVVSEVSGFVKFVDIIDGLTVTRQTDELTGLSSIVVQDVGERATAGKDLRPTIKLVDANGNDIFLPETDVLAQYFLPGKAIVSLDDGTAVKVGEPLARIPQESVGTKDITGGLPRVADLFEARKPKEPAILAEISGIVSFGKETKGKRRLLITPAEGETYEEMIPKWRQLNVFEGEMVQRGDVISDGAETPHDILRLRGVRAVTEYIVNEVQDVYRLQGVKINDKHIEVIVRQMLRKAVITKAYDSEFLEGEQVEVARVKIVNRQREAEGKPPVEFERELLGITKASLATESFISAASFQETTRVLTEAAVAGKRDELRGLKENVIVGRLIPAGTGFAYHQNRHKHRLVDDVVAKLSEEDEAAIADEFVITADDATQNLATLLNSEIED

SEQ ID NO: 11037 - protein, 1343 aa, Haemophilus influenzae
MGYSYSEKKRIRKDFGKRPQVLNVPYLLTIQLDSFDKFIQKDPEGQQGLEAAFRSVFPIVSNNGYTELQYVDYRLEEPEFDVRECQIRGSTYAAGLRVKLRLVSYDKESSSRAVKDIKENEVYMGEIPLMTDNGTFVINGTERVIVSQLHRSPGVFFDSDKGKTHSSGKVLYNARIIPYRGSWLDFEFDPKDNLFARIDRRRKLPATIILRALGYTTEEILNLFFDKITFEIAGDKLLMTLVPERLRGETASFDIEANGKVYVERGRRITARHIKALEKDNISQVVVPSEYILGKVASKDYVDLESGEIICPANGEISLETLAKLAQAGYTTIETLFTNDLDYGPYISETLRVDPTYDKTSALYEIYRMMRPGEPPTPESSEALFNNLFFSAERYDLSTVGRMKFNRSLAFPEGEGAGILSNEDIIAVMRKLIDIRNGRGEVDDIDHLGNRRIRSVGEMAENQFRIGLVRVERAVKERLSLGDLDAITPQDLINPKPISAAVKEFFGSSQLSQFMDQNNPLSEVTHKRRISALGPGGLTRERAGFEVRDVHNTHYGRLCPIETPEGPNIGLINSLSAFARTNDYGFLETPYRKVVDGQVTEEIEYLSVIDEANYIIAQANSNLDENNRFTDAFVTARGERGESGLYKPEDIHYMDVSTQQVVSVAAALIPFLEHDDANRALMGANMQRQAVPTLRADKPLVGTGMEKPIALDSGVAVVAKRGGTVQYVDASRIVIKVNEDETIAGEAGIDIYNLIKYTRSNQNTCINQIPCVNLGDPINRGEVLADGPSTDLGELALGQNIRVAFMPWNGYNFEDSMLVSERVVQQDRFTTIHIQELSCVARDTKLGAEEITADIPNVGESALSKLDESGIVYVGAEVKGGDILVGKVTPKGETQLTPEEKLLRAIFGEKASDVKDSSLRVPNGTSGTVIDVQVFTRDGVEKDKRALEIEEMQLREAKKDLTEELEILEAGLFARVRNLLISSGADAAQLDKLDRTKWLEQTIADEEKQNQLEQLAEQYEELRKEFEHKLEVKRKKIIKGDDLAPGVLKVVKVYLAVKRQIQPGDKMAGRHGNKGVISKINPVEDMPYDENGQPVEIVLNPLGVPSRMNIGQILETHLGLAAKGIGDQINAMLKQKQEVEKLRSYIQKAYDLLGNGSQKVDLSTFTDEEVLRLAGNLRKGLPVATPVFDGADEAEIKELLKLGGLPTSGQITLYDGRTGEKFERPVTVGYMYMLKLNHLVDDKMHARSTGSYSLVTQQPLGGKAQFGGQRFGEMEVWALEAYGAAYTLQEMLTVKSDDVNGRTKMYKNIVSGNQHMEPGTPESFNVIMKEIRSLGLNIELDEE

SEQ ID NO: 11038 - protein, 229 aa, Haemophilus influenzae
MAKLTKKMKAIKAGVDSTKAYEINEAIAVLKQFATAKFVESVDVAVNLGIDPRKSDQNVRGATVLPHGTGREVRVAVFTQGANADAAKEAGADLVGMEDLAEQIKKGEMNFDVVIASPDAMRVVGQLGQVLGPRGLMPNPKVGTVTPNVAEAVKNAKSGQIRYRNDKNGIIHTTIGKANFSEVQLKENLQALLAALNKAKPTTAKGIFIKKVSISTTMGAGVAVDQASL

SEQ ID NO: 11039 - protein, 142 aa, Haemophilus influenzae
MAKKVQAYVKLQVAAGMANPSPPVGPALGQQGVNIMEFCKAFNARTESLEKGLPIPVVITVYADRSFTFVTKTPPAAVLLKKAAGIKSGSGKPNKDKVGKVTLDQVRQIAETKAADMTGATIETKMKSIAGTARSMGLVVEE

SEQ ID NO: 11040 - protein, 359 aa, Haemophilus influenzae
MAKLLDIVKPGVVTGEDVQKVFAYAKEHNFAIPAVNCVGSDSVNAVLETAARVKAPVIIQFSNGGAAFYAGKGIKPTSGTRPDVLGAIAGAKQVHTLAKEYGVPVILHTDHAAKKLLPWIDGLLDAGEKHFAETGRPLFSSHMIDLSEESMEENMAICREYLARMDKMGMTLEIEIGITGGEEDGVDNSDVDESRLYTQPSDVLYVYDQLHPVSPNFTVAAAFGNVHGVYKPGNVKLKPSILGESQEFVSKERNLPAKPINFVFHGGSGSSREEIREAIGYGAIKMNIDTDTQWASWNGILNFYKANEAYLQGQLGNPEGPDAPNKKYYDPRVWLRKMEESMSKRLEQSFEDLNCVDVL

SEQ ID NO: 11041 - protein, 386 aa, Haemophilus influenzae
MSVIKMTDLDLAGKRVFIRADLNVPVKDGKVTSDARIRATIPTLKLALEKGAKVMVTSHLGRPTEGEFKPEDSLQPVVDYLKNAGFNVRLEQDYLNGVDVKDGEIVVLENVRVNKGEKKNDPELGKKYAALCDVFVMDAFGTAHRAQASTYGVAEFAPIACAGPLLAAELDALGKALKEPARPMVAIVGGSKVSTKLEVLNSLSKIADQIIVGGGIANTFIAAAGHNVGKSLYEADLIPVAKELAANTDIPVPVDVRVGLEFSETAAATEKVVNEVKDDESIFDIGDKSAEQLAEIIKNAKTVLWNGPVGVFEFPHFRKGTEIISHAIANSDAFSIAGGGDTLAAIDLFGIADKISYISTGGGAFLEFVEGKVLPAVEILEKRAKN

SEQ ID NO: 11042 - protein, 193 aa, Haemophilus influenzae
MAKLYFYYSTMNAGKSTTLLQSSYNYRERDMNTLVYTAAIDDRFGVGKVTSRIGISQDAFLFRSETNLFDEINEHLKKEKVHCVLVDEAQFLSKQQVYQLSDVVDKLKIPVLCYGLRTDFQAELFEGSKYLLAWADQLEELKTICYCGRKANFVLRLNDQGEVIKEGAQIQIGGNDSYLSVCRLHYKEKCGQI

SEQ ID NO: 11043 - protein, 342 aa, Haemophilus influenzae
MKILGIETSCDETGVAIYDEEKGLIANQLYTQIALHADYGGVVPELASRDHIRKTAPLIKAALEEANLTASDIDGIAYTSGPGLVGALLVGATIARSLAYAWNVPAIGVHHMEGHLLAPMLDDNSPHFPFVALLVSGGHTQLVRVDGVGKYEVIGESIDDAAGEAFDKTAKLLGLDYPGGAALSRLAEKGTPNRFTFPRPMTDRAGLDFSFSGLKTFAANTVNQAIKNEGELIEQTKADIAYAFQDAVVDTLAIKCKRALKETGYKRLVIAGGVSANKKLRETLAHLMQNLGGEVFYPQPQFCTDNGAMIAYTGFLRLKQGQHSDLAIDVKPRWAMAELPAI

SEQ ID NO: 11044 - protein, 71 aa, Haemophilus influenzae
MPVIKVRENESFDVALRRFKRSCEKAGILAEVRAREFYEKPTTIRKRENATLAKRHAKRNARENARNTRLY

SEQ ID NO: 11045 - protein, 225 aa, Haemophilus influenzae
MSNTVATMINKRNIMRNYIKIGVAGPVGAGKTALIEKLTREIASKYSVAVITNDIYTQEDAEFLTKNSLLPPERIMGVETGGCPHTAIREDASMNLEAVDEMVTRFPDVEIVFIESGGDNLSATFSPDLADVTIFVIDVAQGEKIPRKGGPGITRSDLLVINKTDLAPFVGADLSVMERDARRMRNGQPFIFTNLMKKENLDGVIGWIEKYALLKNVEEPASLVR

SEQ ID NO: 11046 - protein, 101 aa, Haemophilus influenzae
MIPGEYQLAEGDILANVGRKTVKIEVTNSGDRPIQVGSHYHFFETNNALKFDRTLARGMRLNVPSGNAVRFEPGEVKSVELVAFGGNQIIYGFHNQIDGKL

SEQ ID NO: 11047 - protein, 100 aa, Haemophilus influenzae
MHLTSREQEKLMLFLAGELAAKRKARGVKLNYPETIAYIASHLQEAAREGMSVAEVMQYGATLLTVDDVMEGVAEMVHEVQIEATFPDGTKLVTVHNPIR

SEQ ID NO: 11048 - protein, 96 aa, Haemophilus influenzae
MNIRPLHDRVIIKREEVETRSAGGIVLTGSAATKSTRAKVLAVGKGRILENGTVQPLDVKVGDIVIFNDGYGVKSEKIDGEEVLIISENDILAIVE

SEQ ID NO: 11049 - protein, 149 aa, Haemophilus influenzae
MQVILLDKIVHLGQVGDQVNVKSGFARNFLIPQGKAVMATKANIEHFEARRAELEATAAANLAAAQARAAEVTALGSVTIASKAGDEGRLFGAITTRDVAEAVTAAGVKIAKSEVRLPNGPIRTLGDHDVRFQLHGEVFAALDVIVVAE

SEQ ID NO: 11050 - protein, 75 aa, Haemophilus influenzae
MARYFRRRKFCRFTAENVVEIDYKDIATLKNYISESGKIVPSRITGTRAKYQRQLARAIKRARYLALLPYTDNHQ

SEQ ID NO: 11051 - protein, 125 aa, Haemophilus influenzae
MRHYEIVFMVHPDQSEQVPGMIERYTGSVKEAGGQVHRLEDWGRRQLAYPINKLHKAHYVLMNVEAPQQVIDELETTFRYNDAVLRSLVIHTKHAVTEASPMKAAKEERKPLAEVENNDFEDAEE

SEQ ID NO: 11052 - protein, 84 aa, Haemophilus influenzae
MRIKNRLFLEDTMAKEDCIEMQGTILETLPNTMFRVELENGHVVTAHISGKMRKNYIRILTGDKVTVEMTPYDLSKGRIIFRSR

SEQ ID NO: 11053 - protein, 287 aa, Haemophilus influenzae
MNSKKHLGHTARKRFGQNFLHDTSVIQGIVAAIYPQPNQFLVEIGPGLGALTEPVGELVDHLTVVELDRDLAERLRHHPFLHQKLTVIETDAMQFDFGALYTKENLAEKGQKLRVFGNLPYNISTPLMFHLFKYHDVIQDMHFMLQKEVVKRLCAAPNSKAYGRLTIMAQYFCQVMPVLEVPPSAFKPAPKVDSAVVRLIPHKELPHPVKDLYWLNRVCSQAFNQRRKTLRNALSTLFSPENLTALGIDLNARAENLAIADYARLANWLADNPPADVNKDEILDSEE

SEQ ID NO: 11054 - protein, 484 aa, Haemophilus influenzae
MSVKGDIGVIGLAVMGQNLILNMNDHGFKVVAYNRTTSKVDEFLQGAAKGTNIIGAYSLEDLAAKLEKPRKVMLMVRAGDVVDQFIEALLPHLEEGDIIIDGGNSNYPDTNRRVKALAEKGIRFIGSGVSGGEEGARHGPSIMPGGNQEAWQYVKPIFQAISAKTEQGEPCCDWVGGEGAGHFVKMVHNGIEYGDMQLICEAYQFLKEGLGLSYEEMQAIFAEWKNTELDSYLIDITTDILGYKDASGEPLVEKILDTAGQKGTGKWTGINALDFGIPLTLITESVFARCVSSFKDQRVAANQLFGKTITPVEGDKKVWIEAVRKALLASKIISYAQGFMLIREASEQFGWDINYGATALLWREGCIIRSRFLGNIRDAYEANPNLVFLGSDSYFKGILENALSDWRKVVAKSIEVGIPMPCMASAITFLDGYTSARLPANLLQAQRDYFGAHTYERTDKPRGEFFHTNWTGRGGNTASTTYDV

SEQ ID NO: 11055 - protein, 494 aa, Haemophilus influenzae
MQTDNNCIVIFGASGDLTHRKLIPALYNLYKIGRLSENFSVLGVARSDLNDETFREKMREALIHNEETTPETLDAFCSHLYYQAVNTSDAQDYGKLVPRLDDLHDKYQTCGNTFYYMSTPPSLYGVIPECLAAHGLNTEEYGWKRIIVEKPFGYDEKTAQTLDVQIHRFFEEHQIYRIDHYLGKETVQNLLVLRFSNGWFEPLWNRNFIDYVEITGAESIGVEERGGYYDGSGAMRDMFQNHLLQVLAMVAMEPPAIINANSMRDEVAKVMHSLRPLTSEDMENNLVLGQYTAAEINGKMEKGYLEEKGVPANSRTETYIALRCEIENWRWAGVPFYVRTGKRLPARVTEIVIHFKTTPHPVFSQNAPENKLIIRIQPDEAISMRFGLKKPGAGFEAKEVSMDFRYADLAGAQVLTAYERLLLDAMKGDATLFARTDAVHAAWKFVQPILDYKANGGRIHEYEAGTWGPVAADKLIAKQGKVWRKPSGLMKKKV

SEQ ID NO: 11056 - protein, 131 aa, Haemophilus influenzae
MAEKEVRLDKWLWAARFYKTRSIAKAMIESGKVHYNNQRAKVSKIVEVGAMLKLRQGNEEKEIKIIALSDQRRGAPEAQLLYQETESSVKKREEIAWARKNNSLSMPHPDRRPNKKERRDLLKFKHQDKFE

SEQ ID NO: 11057 - protein, 806 aa, Haemophilus influenzae
MSETTNDNYGASSIKVLKGLDAVRKRPGMYIGDTDDGTGLHHMVFEVVDNAIDEALAGHCSDIIVTIHDDNSVSVQDDGGGIPVDIHPEEGVSAAEVIMTVLHAGGKFDDNSYKVSGGLHGVGVSVVNALSDKLQLTIRRQGHVHEQFYHLGEPQSPLTVIGETEATGTTVRFWPSSDIFAITTFDYKILAKRLRELSFLNSGVSIRLIDKRDGSEDHFHYEGGIQAFVEYLNKNKNPIHPKPFYFTAEKDGIGVEVALQWNDGVNENVYCFTNNIPQRDGGTHLAGFRGALTRSLNSYMENEGMLKKEKVATSGDDAREGLVAIISVKVPDPKFSSQTKDKLVSSEVKSAVESAMNEKMQEYLLENPADAKIIVNQIIMAARAREAARKAREMTRRKGALDIAGLPGKLADCQEKDPALSELYLVEGDSAGGSAKVGRDRKTQAILPLKGKILNVEKARFDKMLSSQEVGTLITALGCGIGRDEYNPDKLRYHHIIIMTDADVDGSHIRTLLLTFFYRQMPELIERGYVYIAQPPLYKVKKGKQERYIKDADEMEQYELTLALDGAELHISTNAPAMNALVFEKLVAEYNSVQKLIGRLNRHYPAPVLQGLIYQSPISIEMMKEESAVENWGKSFVEQLTAKETEAHQYSVRTQFNAERQVYEAVITVRKHGIDTDYFLNFDFVHGNEYAKIVSLNKQLNGLLEEGAYVIRGEKVQPVRSFEQAVEWLVKESRKGLEVQRYKGLGEMNADQLWETTMDPNSRRMLKVSIKDAVAADQLFTTLMGDEVEPRREFIELNALRANLDV

SEQ ID NO: 11058 - protein, 762 aa, Haemophilus influenzae
MLNQQISQIIAAELTVQPQQIFAAIQLLDDGNTIPFIARYRKEATGGLDDTQLRHFETRLIYLRELEDRRQTILKSIEEQGKLTDELRDKIHATQSKTELEDLYLPYKPKRRTKGQIAIEAGLEPLANLLWNEPKNDPESTALSFVDAEKGVADSKAALDGARIILMERFAEDAGLLAKVRDYLAKNAVIVSKVIEGKETEGAKFQDYFDHQELLKNVPSHRALAMFRGRNEGILQLSLNADPDAEEGSRQSYCEEIIRDYLDVRFTGQPADKWREQVIAWTWKIKVSLHLETELMASLREKAEEEAIDVFARNLTALLMAAPAGAKSTMGLDPGLRTGVKVAMVDNTGKLLDTTTIYPHTGREAEAQVAIFSLIRKHNVELIAIGNGTASRETERFAKDVIKEIKENKPQTVVVSEAGASVYSASEFAANEFPNLDVSLRGAVSIARRLQDPLAELVKIEPKAIGVGQYQHDVNQTQLARKLDAVVEDCVNAVGVDLNTASAPLLARVAGMTKTLAQNIVEYRDENGRFESRSELKKVPRLGPKAFEQCAGFMRIANGKNPLDASGVHPEAYPVVEKILQATAQSIQDLMSNAGVVRQLDAKQFIDEQFGLPTVQDIFKELEKPGRDPRGEFKTAVFAEGVEEITDLKSGMILEGTVTNVTNFGAFVDIGVHQDGLVHISSLSDKFVEDPHQVVKTGNIVKVKVLEVDVPRKRIALTMRLDESAVKNDSKSDRTLSTRPRGNMQREARNSRGNNVIGNAFA

SEQ ID NO: 11059 - protein, 394 aa, Haemophilus influenzae
MSKEKFERTKPHVNVGTIGHVDHGKTTLTAAITTVLAKHYGGAARAFDQIDNAPEEKARGITINTSHVEYDTPTRHYAHVDCPGHADYVKNMITGAAQMDGAILVVAATDGPMPQTREHILLGRQVGVPYIIVFLNKCDMVDDEELLELVEMEVRELLSQYDFPGDDTPIVRGSALQALNGVAEWEEKILELANHLDTYIPEPERAIDQPFLLPIEDVFSISGRGTVVTGRVERGIIRTGDEVEIVGIKDTAKTTVTGVEMFRKLLDEGRAGENIGALLRGTKREEIERGQVLAKPGSITPHTDFESEVYVLSKDEGGRHTPFFKGYRPQFYFRTTDVTGTIELPEGVEMVMPGDNIKMTVSLIHPIAMDQGLRFAIREGGRTVGAGVVAKIIK

SEQ ID NO: 11060 - protein, 700 aa, Haemophilus influenzae
MARTTPIERYRNIGISAHIDAGKTTTTERILFYTGVSHKIGEVHDGAATMDWMEQEQERGITITSAATTAFWSGMSQQFPQHRINVIDTPGHVDFTVEVERSMRVLDGAVMVYCAVGGVQPQSETVWRQANKYEVPRIAFVNKMDRTGANFLRVVEQLKTRLGANAIPLQLPVGAEENFTGVVDLIKMKAINWNEADQGMTFTYEEVPANMQADCEEWRQNLVEAAAEASEELMEKYLGGEDLTEEEIKSALRQRVLANEIILVTCGSAFKNKGVQAMLDAVVEYLPAPTDIPAIKGINPDETEGERHASDEEPFSSLAFKIATDPFVGNLTFFRVYSGVINSGDTVLNSVRQKRERFGRIVQMHANKREEIKEVRAGDIAAAIGLKDVTTGDTLCAIDAPIILERMEFPEPVISVAVEPKTKADQEKMGLALGRLAQEDPSFRVHTDEESGETIISGMGELHLDIIVDRMKREFKVEANIGKPQVSYRETIRTRVNDVEGKHAKQSGGRGQYGHVVIDLYPLDPEGPGYEFVNEIKGGVIPGEYIPAVDKGIQEQLKSGPLAGYPVVDLGVRLHFGSYHDVDSSELAFKLAASLAFKAAFSKANPVLLEPIMKVEVETPPEYVGDVIGDLSRRRAMVNGQEANEFVVKIYAEVPLSEMFGYATDLRSQTQGRASYSMEPLKYAEAPTSVAAAVIEARKK

SEQ ID NO: 11061 - protein, 156 aa, Haemophilus influenzae
MPRRRSVEARKILPDPKFGSELLAKFINVIMVDGKKSVAESIVYGALETLAQRTGKEPLEAFEVALENVRPTVEVKSRRVGGSTYQVPVEVRPVRRNALGMRWIVEAARKRGDKSMALRLANELSDASDNKGAAVKKREDVHRMAEANKAFAHYRW

SEQ ID NO: 11062 - protein, 124 aa, Haemophilus influenzae
MATINQLVRKPRVKKVVKSNVPALEACPQKRGVCTRVYTTTPKKPNSALRKVCRIRLTNGFEVTSYIGGEGHNLQEHSVVLIRGGRVKDLPGVRYHTVRGALDCAGVKDRKQGRSKYGVKRPKA

SEQ ID NO: 11063 - protein, 629 aa, Haemophilus influenzae
MFYTETYDVIVIGGGHAGTEAALAPARMGFKTLLLTHNVDTLGQMSCNPAIGGIGKGHLVKEVDAMGGLMAHAADKAGIQFRTLNSSKGPAVRATRAQSDRVLYRQAVRTALENQPNLDIFQQEATDILIEQDRVTGVSTKMGLTFRAKSVILTAGTFLAGKIHIGLENYEGGRAGDSASVNLSHRLRDLGLRVDRLKTGTPPRIDARTINFDILAKQHGDEVLPVFSFMGSVDDHPQQIPCYITHTNEQTHEVIRNNLDRSPMYTGVIEGIGPRYCPSIEDKVMRFADRNSHQIYLEPEGLTSNEVYPNGISTSLPFDVQMGIVNSMKGLENARIVKPGYAIEYDYFDPRDLKPTLETKSISGLFFAGQINGTTGYEEAAAQGLLAGINAGLYVQEKDAWYPRRDQSYTGVLVDDLCTLGTKEPYRVFTSRAEYRLLLREDNADIRLTPIAHELGLIDEARWARFNQKMENIEQERQRLRSIWLHPRSEYLEEANKVLGSPLVREASGEDLLRRPEMTYDILTSLTPYKPAMEDKEAVEQVEIAIKYQGYIEHQQEEIEKQKRHENTAIPANFDYSKVSGLSNEVRAKLEQHRPVSIGQASRISGITPAAISIILVNLKKQGMLKRGE

SEQ ID NO: 11064 - protein, 310 aa, Haemophilus influenzae
MRIVIALGGNALLRRGEPMTAENQRQNVRIACEQIAKIWPNNELVIAHGNGPQVGLLALQGAAYTDVPTYPLDVLGAETAGMIGYMIQQELGNLVPFEVPFATLLSQVEVDINDPAFKNPTKPIGPVYTKEEAERLAKEKNWSIAQDGDKYRRVVPSPLPKRIFEIRPVKWLLEKGSIVICAGGGGIPTYYDEHHNLQGVEAVIDKDLCSALLAENLDADLFIIATDVSATFVDWGKPNQKAISVASPEAISELGFASGSMGPKVQAAINFAKQTGKDAVIGSLSDIVDIVKGKAGTRITKKTEGISYYA

SEQ ID NO: 11065 - protein, 335 aa, Haemophilus influenzae
MITSQTPITVLGAGSYGTALAITFSRNGSPTHLWGHNPAHIAQMQTERQNYRFLPDVIFPEDLHLESNLAQAMEYSQDILIVVPSHAFGEILIKIKPHLKAHHRLIWATKGLERNTGRLLQTVVEEQLGTQYPLAVLSGPTFAKELAQGLPSAITLAANNEQFAREFQSRIHCSKGFRVYINSDMTGVQLGGAIKNVIAIGAGISDGMGFGANARTALITRGIAEITRLGISLGANTNTFMGMSGLGDLVLTCTDNQSRNRRFGLMLGKGLDAQMAMENIGQVVEGFYNTKEAYLLAQRQGVEMPITEQIYQMLFCGKSAQDVAISLLGRACKGE

SEQ ID NO: 11066 - protein, 267 aa, Haemophilus influenzae
MTLDVWQHIRQEAKELAENEPMLASFFHSTILKHQNLGGALSYLLANKLANPIMPAISLREIIEEAYQSNPSIIDCAACDIQAVRHRDPAVELWSTPLLYLKGFHAIQSYRITHYLWNQNRKSLALYLQNQISVAFDVDIHPAAKIGHGIMFDHATGIVVGETSVIENDVSILQGVTLGGTGKESGDRHPKVREGVMIGAGAKILGNIEVGKYAKIGANSVVLNPVPEYATAAGVPARIVSQDKAAKPAFDMNQYFIGIDDGMNLNI

SEQ ID NO: 11067 - protein, 273 aa, Haemophilus influenzae
MKLKQLFAITAIASALVLTGCKEDKKPEAAAAPLKIKVGVMSGPEHQVAEIAAKVAKEKYGLDVQFVEFNDYALPNEAVSKGDLDANAMQHKPYLDEDAKAKNLNNLVIVGNTFVYPLAGYSKKIKNVNELQDGAKVVVPNDPTNRGRALILLEKQGLIKLKDANNLLSTVLDIVENPKKLNITEVDTSVAARALDDVDLAVVNNTYAGQVGLNAQDDGVFVEDKDSPYVNIIVSRTDNKDSKAVQDFIKSYQTEEVYQEAQKHFKDGVVKGW

SEQ ID NO: 11068 - protein, 345 aa, Haemophilus influenzae
  VARIANT (1)...(345): Xaa = Any Amino Acid
MIKLNNIXKIFELPXKKLTALDNVSLNIEKGQICGVIGASGAGKSTLIRCVNLLEKPTSGSVIVDGVELTKLSDRELVLARRQIGMIFQHFNLLSSRTVFENVALPLELESESKAKIQEKITALLDLVGLSEKRDAYPSNLSGGQKQRVAIARALASDPKVLLCDEATSALDPATTQSILKLLKEINRTLGITILLITHEMEVVKQICDQVAVIDQGRLVEQGTVGEIFANPKTELAQEFIRSTFHISLPDEYLENLTDTPKHSKAYPIIKFEFTGRSVDAPLLSQASKKFGVELSILTSQIDYAGGVKFGYTIAEVEGDEDAITQTKVYLMENNVRVEVLGYVQ

SEQ ID NO: 11069 - protein, 394 aa, Haemophilus influenzae; identical to SEQ ID NO: 11059

SEQ ID NO: 11070 - protein, 334 aa, Haemophilus influenzae
MAKPIVFSGVQPSGELTIGNYLGALRNWVKMQEDYECIFCVVDLHAITVRQDPVALRKATLDVLALYLACGIDPNKSTIFVQSHVPEHTQLSWVLNCYTYFGEMSRMTQFKDKSARYAENINVGLFDYPVLMAADILLYQAKSVPVGDDQKQHLEITRDIANRFNALYGNIFTIPEIFIGKAGARIMSLQDPEKKMSKSDDNRNNVVTLLEDPKSVAKKIKRAVTDSDEPPVVRYDVQNKAGVSNLLDILSAVTDKPIADLEKEFEGKMYGHLKTAVADEVSTLLASLQERFHQYRNDETLLDNILRQGAEKARAKAQETLAKVYEAVGFVAAK

SEQ ID NO: 11071 - protein, 163 aa, Haemophilus influenzae
MALNLQDKQAIVAEVNEAAKGALSAVIADSRGVTVEKMTELRKSAREAGVTMRVVRNTLLRRAVEGTDYECLKDTFVGPTLIAFSNEHPGARARLFKEFAKANDKFEIKGAAFEGKIQDVEFLATLPTYEEAIARLMGTMKEAAAGKLARTFAALRDKLQEAA

SEQ ID NO: 11072 - protein, 123 aa, Haemophilus influenzae
MSLTNEQIIEAIASKTVTEIVELIAAMEEKFGVSAAAAVAAAPAAGGAAAAEEKTEFDVVLKSAGANKVAVIKAVRGATGLGLKEAKDLVESAPANLKEGVSKEEAEALKKELEEAGAEVEVK

SEQ ID NO: 11073 - protein, 456 aa, Haemophilus influenzae
MTKKALSAVILAAGKGTRMYSDLPKVLHTIAGKPMVKHVIDTAHQLGSENIHLIYGHGGDLMRTHLANEQVNWVLQTEQLGTAHAVQQAAPFFKDNENIVVLYGDAPLITKETLEKLIEAKPENGIALLTVNLDNPTGYGRIIRENGNVVAIVEQKDANAEQLNIKEVNTGVMVSDGASFKKWLARVGNNNAQGEYYLTDLIALANQDNCQVVAVQATDVMEVEGANNRLQLAALERYFQNKQASKLLLEGVMIYDPARFDLRGTLEHGKDVEIDVNVIIEGNVKLGDRVKIGTGCVLKNVVIGNDVEIKPYSVLEDSIVGEKAAIGPFSRLRPGAELAAETHVGNFVEIKKSTVGKGSKVNHLTYVGDSEIGSNCNIGAGVITCNYDGANKFKTIIGDDVFVGSDTQLVAPVKVANGATIGAGTTITRDVGENELVITRVAQRHIQGWQRPIKKK

SEQ ID NO: 11074 - protein, 272 aa, Haemophilus influenzae
MDLYAVWGNPIAQSKSPLIQNKLAAQTHQTMEYIAKLGDLDAFEQQLLAFFEEGAKGCNITSPFKERAYQLADEYSQRAKLAEACNTLKKLDDGKLYADNTDGIGLVTDLQRLNWLRPNQHVLILGAGGATKGVLLPLLQAQQNIVLANRTFSKTKELAERFQPYGNIQAVSMDSIPLQTYDLVINATSAGLSGGTASVDAEILKLGSAFYDMQYAKGTDTPFIALCKSLGLTNVSDGFGMLVAQAAHSFHLWRGVMPDFVSVYEQLKKAML

SEQ ID NO: 11075 - protein, 638 aa, Haemophilus influenzae
MIIFSNLSLKRGQTELLENASATINPKQKVGLVGKNGCGKSSLFALLKKELMPEGGEVNYPANWRVSWVNQETPALDISAIDYVIQGDREYCRLQQKLERANERNDGNAIARIHGQLETLDAWTIQSRAASLLHGLGFSQEETIQPVKAFSGGWRMRLNLAQALLCPSDLLLLDEPTNHLDLDAVIWLERWLVQYQGTLVLISHDRDFLDPIVTKILHIENQKLNEYTGDYSSFEVQRATKLAQQTAMYRQQQQKISHLQKYIDRFKAKATKAKQAQSRMKALERMELIAPAYVDNPFTFEFRPPQSLPNPLVMIEQASAGYGIGESAVEILSKIKLNLVPGSRIGLLGKNGAGKSTLIKLLAGELTALSGTVQLAKGVQLGYFAQHQLDTLRADESALWHMQKLAPEQTEQQVRDYLGSFAFHGDKVNQAVKSFSGGEKARLVLALIVWQRPNLLLLDEPTNHLDLDMRQALTEALVDYEGSLVVVSHDRHLLRNTVEEFYLVHDKKVEEFKGDLEDYQKWLSEQNSTSENKVSEKVGDNENSVQNRKEQKRREAELRQQTAPLRKKITQLEEKMNKFSSELANIENQLADTELYNAENKEKLTALLAQQVDVKKALDDVETEWMTAQEELEEMLQA

SEQ ID NO: 11076 - protein, 225 aa, Haemophilus influenzae
MARSIIAVLPAAGVGSRMQADKPKQYLTLLGKTLLEHTLDVMLSYPAVSKIILAVSKDDPYISTLSLDPKIQLVEGGTTRAESVLNGLNAIAEKNAWVLVHDAARPCLQHADIDKLLAIEDKQGAILAIPVTDTIKRADNQQCIVKTEDRSQLWQAMTPQFFPVDILRDALSTGIQQGANITDEASAIELAGFRPHLVAGRSDNLKVTRPEDLALAEFYLTRNKL

SEQ ID NO: 11077 - protein, 295 aa, Haemophilus influenzae
MLTALNRYWDYLRIERQMSPHTITNYQHQLDATIKILAQQDIHSWTQVTPSVVRFILAESKKQGLKEKSLALRLSALRRFLSFLVQQGELKVNPATGISAPKQGRHLPKNMDGEQVQQLLANDSKEPIDIRDRAILELMYSSGLRLSELQGLDLNSINTRVREVRVIGKGNKERVVPFGRYASHAIQEWLKVRALFNPKDEALFVSQLGNRISHRAIQKRLETWGIRQGLNSHLNPHKLRHSFATHMLEASSDLRAVQELLGHSNLSTTQIYTHLNFQHLAEVYDQAHPRAKRKK

SEQ ID NO: 11078 - protein, 263 aa, Haemophilus influenzae
MARRPLVMGNWKLNGSKAFTKELIEGLKAELHDVTGCDVAIAPPVMYLGTAEAALSGCGCSCGGKSVIQLGAQNVDINVKGAFTGDISTEMLKDFGAKYIIIGHSERRTYHKESDEFVAKKFGALKEAGLVPVLCIGESEAENEAGKTEEVCARQIDAVINALGVEAFNGAVIAYEPIWAIGTGKSATPAQAQAVHAFIRGHIAAKSQAVAEQVIIQYGGSVNDANAAELFTQPDIDGALVGGASLKAPAFAVIVKAAAAAKN

SEQ ID NO: 11079 - protein, 492 aa, Haemophilus influenzae
MANYFNTLNLRQKLDQLGRCRFMDREEFADEANFLKGKKIVIVGCGAQGLNQGLNMRDSGLDISYALRPEAIAEKRASFQRATENGFKVGTYEELIPTADLVVNLTPDKQHSKVVADVMPLMKKDSAFGYSHGFNIVEVGEEIRKDITVVMVAPKCPGTEVREEYKRGFGVPTLIAVHPENDPKGEGMAIAKAWAAATGGHKAGVLESSFVAEVKSDLMGEQTILCGMLQAGSIVCYDKLVADGKDPAYAGKLIQYGWETITEALKQGGITLMMDRLSNSAKLRAFELAEQIKESLGFLYYKHMDDIISGHFSATMMADWANGDKDLFAWREATGKTAFENAPKYDGKISEQEYFDNGVLMIAMVKAGVELAFDAMVASGIYEESAYYESLHELPLIANTIARKRLYEMNVVISDTAEYGNYLFSNVATPILAKEIIPNLQKGDLGEPTPAVEVDNITLRDVNDAIRNHPVELIGQELRGYMTDMKRIAVAG

SEQ ID NO: 11080 - protein, 503 aa, Haemophilus influenzae
MTDKKYIIALDQGTTSSRAVLLDHNANVVEIAQREFTQIYPRAGWVEHNPMEIWATQSSTLNEVVAKAGITSDEIAAIGITNQRETTIVWEKSTGTPVYNAIVWQCRRTADITDKLKADGHEEYIRNTTGLVVDPYFSGTKVKWILDNVEGAREKAERGELLFGTVDTWLVWKLTQGRVHVTDYTNASRTMLFNIHTKQWDDKMLEILNIPRSMLPEVRNSSEIYGQTNIGGKGGVRIPVAGIAGDQQAALYGHLCVHAGQAKNTYGTGCFMLLHTGNKAITSKNGLLTTIACNAKGEPEYALEGSVFIAGASIQWLRDELKIVHDSFDSEYFAQKVTDSNGVYVVPAFTGLGAPYWDPYARGAIFGLSRGANRNHIVRATLESIAYQTRDVLEAMQSDSGERLQYLRVDGGATNNNFLMQFQADILDVNVERPVVKEVTALGAAYLAGLATGFWKDLDELRDKARVERTFSPDSDNEKRERRYKGWKKAVKRSLEWAKEDEE

SEQ ID NO: 11081 - protein, 861 aa, Haemophilus influenzae
MISEENFQQHTPMMQQYLKLKAENPDILLFYRMGDFYELFYDDAKKAAALLDISLTKRGQSAGQPIPMAGMPYHAVEGYLAKLVQLGESVAICEQIGDPTTSKGPVERQIVRIVTPGTVSDEALLPERQDNLIAAVYQEKEKFGLATLDMTSGRFQLCEPADKETLRAELQRIAPVELLYCEEFNEMAAIEHCKGLRRRPIWEFELSTAITLLNRQFGTKDLRAFGVEKSPLGLSAAGCLLQYAKETQRTALPHIQSISLIQNQDCIQLDAATRRNLELTQNLAGGTENTLASVLDKCVTPMGSRLLKRWIHQPVRDVEKLKQRQQSIAEILNFDLVDELQPYLQLVGDMERILARVALRSARPRDLTRLRTALEQIPALRAIVQQKTPPFLTALFSQIADFSEQCDLLQRALIETPPLLIRDGGVIAEGYNAELDEWRMLSDGATQYLENLEKRERESTGIDTLKIGFNAVHGYYIQISQGQAHKAPIHYVRRQTLKNAERYIIPELKEYEDKVLKSKGAALALEKQLYDELFDLLLPHLGSLQLASLALSELDVLVNLAERADTLNYVMPTFCDEVSVKIKNGRHPVVEQVLKDPFIANPVELNHNRHLLVITGPNMGGKSTYMRQTALITLLAYIGSFVPADSARIGPIDRIFTRIGASDDLASGRSTFMVEMTEMANILHQATAQSLVLIDEIGRGTSTYDGLSLAWACAEWLSKKIRSLTLFATHYFELTALPEQLEGIANIHLDALEHNNTIAFMHAVQNGAASKSYGLAVAALAGVPQSVIKLAKQKLTQLEKNSSYSAEQQIQALREANHNQGELFFEQETDALREAIEKLDPDDLSPKQALAYLYQLKKMVG

SEQ ID NO: 11082 - protein, 106 aa, Haemophilus influenzae
MIFFAAAAIGNIYFQQIYSLPIRVIGMAIALVIAFILAAITNQGTKARAFFNDSRTEARKVVWPTRAEARQTTLIVIGVTMIASLFFWAVDSIIVTVINFLTDLRF

SEQ ID NO: 11083 - protein, 185 aa, Haemophilus influenzae
MTEETTVSKKRWYVLQAFSGFESRVALTLREYIKQQQMEDQFGEVLVPTEEVVENVAGKRRKSERKFFPGYVLVEMEMNDETWHLVKSVPRVMGFIGGTPDKPAPISKREADTILNRLEQNTDKPRHRNEYHPGEEVRVTEGPFADFNGTVEEVDYEKGRLKVSVSMFGRATPVELEFGQVEKIH

SEQ ID NO: 11084 - protein, 415 aa, Haemophilus influenzae
MNFFQYKHNKLYAEDMPVQQLAEQFGTPLYVYSRATLERHWHAFDSAFGNRPHLICFAVKSCSNIGVLNIMAKLGSGFDIVSQGELERVLAAGGDASKVVFSGVAKSREEIMRALEVRIRCFNVESVSELKHINQIAGEMGKIAPISLRVNPDVDAHTHPYISTGLKENKFGVSVNEAREVYKLASTLPNIKITGMDCHIGSQLTELQPFLDATDRLIVLMEQLKEDGITLKHLDLGGGLGVTYTDETPPHPSDYANALLEKLKNYPELEIILEPGRAISANAGILVAKVQYLKSNESRNFAITDTGMNDMIRPALYEAYMNIVEIDRTLEREKAIYDVVGPVCETSDFLGKQRELSIAEGDYIAQCSAGAYGASMSSNYNSRARTAEVLVDGDQSYLIRRRETLQELWALESTI

SEQ ID NO: 11085 - protein, 619 aa, Haemophilus influenzae
MLDSPLLSKIIEKPTALSVLKSVFGYQSFRKGQEEVINAALNGQDALVVMATGNGKSLCYQIPALCFDGLTLVISPLISLMKDQVDQLQANGIEADFLNSSQTLEQQQQVQNKLISGQLKLLYVSPEKVMTNSFFQLISYSKVCFIAIDEAHCISQWGHDFRPEYTQLGGLKASFPDAPIMALTATADYATQQDILRHLNLKNLHKYIGSFDRPNIRYTLEEKYKPMEQLTRFVLAQKGKSGIIYCNSRNKVERIAESLRNKGVSAAAYHAGMETAIRERVQQDFQRDNVQVVVATIAFGMGINKSNVRFVAHFDLPRSIESYYQETGRAGRDDLPAEAVLFYEPADYAWLQKILLEKPETPQRQIEQHKLEAIGEFAESQTCRRLVLLNYFGEHRQTPCNNCDICLDPPKKYDGLVDAQKVMSTIYRVGQCFGAHYVIAVLRGMHNQKIIERQHHKLSVYGIGKDKSKEHWQSVIRQLIHLGFVQQVISELNPTLQLTESAKVILKGEEPLELAMPRISAISKIAHNPQRQGVANYDKDLFARLRFLRKQIADKENIPPYIVFNDATLQEMAQYMPTSNIEMLQINGVGSIKLERFGQPFMALIQEHKAILANAQNND

SEQ ID NO: 11086 - protein, 572 aa, Haemophilus influenzae
MRTSQYLFSTLKETPNDAQVVSHQLMLRAGMIRPMASGLYNWLPTGIRVLKKVEKVVREEMNKGGAIEVLMPVVQPAELWEESGRWDQYGPELLRFEDRGNRNFVLGPTHEEVITDLVRREVSSYKQLPLNLYQIQTKFRDEVRPRFGVMRSREFIMKDAYSFHTTQESLQATYDVMYQVYSNIFNRLGLDFRAVQADTGSIGGSASHEFQVLASSGEDDVVFSTESDFAANIELAEAIAIGERQAPTAEMCLVDTPNAKTIAELVEQFNLPIEKTVKTLIVKGADENQPLVALIIRGDHELNEIKAQKHPLVADPLEFADETEIKAKIGSGVGSLGAVNLNIPAIIDRTVALMSDFSCGANIDGKHYFNVNWERDVAIPKVFDLRNVVEGDPSPDGKGTLQIKRGIEVGHIFQLGKKYSEAMKATVQGEDGKPLVMTMGCYGIGVTRVVASAIEQHHDERGIIWPSDEIAPFTVAIVPMNMHKSEAVQKYAEELYRTLQSQGVDVIFDDRKERPGVMFADMELIGVPHMVVIGEKNLDNGEIEYKNRRTGEKEMISKDKLLSVLNEKLGNL

SEQ ID NO: 11087 - protein, 240 aa, Haemophilus influenzae
MLKLLRIFLVLICCILICVLGTIYSFIRFKNPSNVGIVARWFGRLYPLFGLKVEHRIPQDQKQISRAIYIGNHQNNYDMVTISYMVQPRTVSVGKKSLIWIPFFGILYWVTGNIFLDRENRTKAHNTMSQLARRINEDNLSIWMFPEGTRNRGRGLLPFKTGAFHAAISAGVPIIPVVCSSTHNKINLNRWDNGKVICEIMDPIDVSGYTKDNVRDLAAYCHDLMEKRIAELDEEIAKGN

SEQ ID NO: 11088 - protein, 612 aa, Haemophilus influenzae
MPKLRSATSTQGRNMAGARALWRATGMKENDFGKPIIAVVNSFTQFVPGHVHLKDMGQLVAAEIEKAGGVAKEFNTIAVDDGIAMGHGGMLYSLPSRDLIADSVEYMVNAHCADAMVCISNCDKITPGMLMAAMRLNIPTIFVSGGPMEAGKTKLSDQLIRLDLVDAMIEAADPNVSDERIDAIERSACPTCGSCSGMFTANSMNCLTEALGLSLPGNGSMLATHADRKELFLKAGRQIVELCKRYYEQDDASVLPRSIGTFDAFENAMSLDIAMGGSSNTVLHLLAAAQEAGVDFKMEDIDRLSRKVPCLSKIAPNTNKYHMEDVHRAGGIMGLLGELDRAGLIHKNTHTVLGMSMGEQLDQYDIIRNQDEELHKFFRAGPAGIRTTQAFSQDCRWDTVDNDRVNGCIRNKENAISQEGGLAVLFGNLAEDGCIVKTAGVDESIWKFTGTAIVFESQEDAVAGILGGKVKEGHVVVIRYEGPKGGPGMQEMLYPTSYLKSMGLGKKCALLTDGRFSGGTSGLSIGHVSPEAASGGAIGLVRNGDIINIDIPNRAINLEISNEELATRRAEQDQKGWQPANREREVSFALKVFGHFATSADKGAVRDKTLLK

SEQ ID NO: 11089 - protein, 1159 aa, Haemophilus influenzae
MSSQPRFIHLRTHTDFSMIDSIVKVKPLVKACAANEMVAMGLTDFTNFCGVVSFYSEMLSSGMKPIIGADVKVKSPLCGDEYFDLTLLAKNNEGYRNITLLLSKAYQRGYNDLPYIDQDWLIEHRDGVIILSGGTQGDVGKKLLKENVAEIESAVAFYQEFFADHFYLALSRTGRPNEERYIQAALKLAERCDLPLVATNDVMFLNTEDFEAHEIRVAIHDGYTLDDPKRPKCYTSQQYFRSEEDMCKLFADIPSALENTLLIAQRCSVTLRLGQYFLPQFPTGDLSTEDFLVQKSKEGLEERLVFLFPDEKVRLEKRPKYDERLQVELDVINQMGFPGYFLIVMEFIQWSKDNDIPVGPGRGSGAGSLVAYALKITDLDPLEFDLLFERFLNPERVSMPDFDVDFCMDGRDRVIEHVAETYGRGAVSQIITFGTMAAKAVIRDVGRVLGHPYGFVDRISKLIPPDPGMTLAKAFETEPQLQTAYDSDEEVRALINMARKLEGVTRNAGKHAGGVVISPTLITDFAPLYCDNEGLHPVTHFDKNDVEYAGLVKFDFLGLRTLTIIKWALDIINVRMVREGKPRVDIAAIPLDDPESFELLKRSETTAVFQLESRGMKDLIKRLQPDCFEDIIALVALFRPGPLQSGMVDNFIDRKHGREEVSYPDAEYQHASLKPILEPTYGIILYQEQVMQIAQVLAGYTLGGADLLRRAMGKKKPEEMAKQRLVFKEGAEKNGIDGELSMKIFDLVEKFAGYGFNKSHSAAYALVSYQTLWLKTHFPAEFMAAVMTSEMDNTDKIVGLYDECLRMGLKVTPPDINIGKHHFSVNEQGEIVYGIGAIKGVGEGPIEALVAARNEGGIFKDLFDLCARVDLKKINRRTFESLIMSGAFDKLGPHRAALSKNLEDALRASDQHAKDEAMGQTDMFGVLTETHEDVENAYANTPPYTEKQILDGERETLGLYLSSHPVSRYLKELSHYTSTRLKDLAPNRRGQISTVAGLVVASRIAMTKKGNRLGIATLDDRSGRLDLTLFGESLEQFGEKLQKDTVIVASGQVSFDDFSGGLKMTVRELMTLDEARSRYVKSLAISLSEHQITPSFIKQFKALLEPVSGGTLPINVYYQSPKGRALLRLGVQWSIIPTDEILTELVNLLGESAVELEFE

SEQ ID NO: 11090 - protein, 485 aa, Haemophilus influenzae
MGMNRVLVSQAAGGLAEYLKGYDKEPSIVIGYDGRKNSDVFARDTAEIMAGAGVKAYLLPRKLPTPVLAYAIQYFDTTAGVMVTASHNPPEDNGYKVYLGKANGGGQIVSPADKDIAALIDKVAAGNIQDLPRSDNYVVLNDEVVDAYITKTASLAKEPACDINYVYTAMHGVGYEVLSKTLAKAGLPQPHVVADQVWPDGTFPTVNFPNPEEKGALDLAIKVAKEKNAEFIIANDPDADRLAVAVPDAQGNWKSLHGNVVGCFLGWYLAKQYQGKQGTLACSLVSSPALAEIAKKYSFQSEETLTGFKYIGKVSGLLFGFEEALGYLVDPDKVRDKDGISAAIVFLDLVRNLKKQGKTLADYADEFTKEFGAYVSGQISIRVSDLSEIGKLMTALRNNPPAEIAGVKVAQFIDHIKTDRQSDILVFNLENGGRLIARPSGTEPKIKFYLDARGKDPKDADRVLAEFDEGVRHILRQDAYGKQDC

SEQ ID NO: 11091 - protein, 444 aa, Haemophilus influenzae
MKNVVIVGGGAGGIELATFLGNKLGRQKQAKVTLVDRNATHLWKPLLHEIATGVMDDGVDSLSYRAHGKNHFFSFEQGSIIRINREQKYVELAPVYGQEGDMLVIARRIPYDYLVIAIGSKSNDFNTKGVADNCIFLDSSKQALRFQHKLLELFLKFSENRALDDIGEEEFKQKLVDENKVNIAIVGGGATGVELTAELYHAAEDLSSYGYGKIDSSCLQVTLVEAGTRLLPALPENLSAAVLDELKEMGTNVQLNTMITEAQPNTLITKDGGEIKADLIVWAAGVRASTVTQQFDGLEINRINQLVVKDTLQTTVDDSIFAIGDCAALIQSNGKLVPPRAQAAHQMAKACAKNIFALFENKPLKSFKYNDKGTLVSLSNFTALGSLTNKFGKNPLTVQGKFAQFAYVSLYRMHQHALHGCIKIGLIILVDKLNRYLKPRLKLH

SEQ ID NO: 11092 - protein, 303 aa, Haemophilus influenzae
MNDIILKSLSTLITEQRNPNSVDIDRQSTLEIVRLMNEEDKLVPLAIESCLPQISLAVEQIVQAFQQGGRLIYIGAGTSGRLGVLDASECPPTFGVSTEMVKGIIAGGECAIRHPVEGAEDNTKAVLNDLQSIHFSKNDVLVGIAASGRTPYVIAGLQYAKSLGALTISIASNPKSEMAEIADIAIETIVGPEILTGSSRLKSGTAQKMVLNMLTTASMILLGKCYENLMVDVQASNEKLKARAVRIVMQATDCNKTLAEQTLLEADQNAKLAIMMILSTLSKSEAKVLLERHQGKLRNALSK

SEQ ID NO: 11093 - protein, 70 aa, Haemophilus influenzae
MKQGIHPEYKEITATCSCGNVIKTRSTLGKDINLDVCGNCHPFYTGKQRVVDTGGRVERFNSRFKIPSTK

SEQ ID NO: 11094 - protein, 414 aa, Haemophilus influenzae
MNDIFIGLQLREHFMAEENKKGGFWASLFGRNKKQDEPKIEPIIEEEKIKDIEPSIEKFEANDLVEEEKIQEISTALEPIEEIIEAKNLEDEFQPVVEIETREKPSEGGFFSRLVKGLLKTKQNIGAGFRGFFLGKKIDDELFEELEEQLLIADIGVPTTSKIIKNLTEHASRKELQDAELLYQQLKVEMADILEPVAQPLEIDSTKKPYVILMVGVNGVGKTTTIGKLARKFQAEGKSVMLAAGDTFRAAAVEQLQVWGERNHIPVVAQSTGSDSASVIFDAMQSAAARNIDILIADTAGRLQNKNNLMDELKKIVRVMKKYDETAPHEIMLTLDAGTGQNAISQAKLFNEAVGLTGISLTKLDGTAKGGVIFAIADQFKLPIRYIGVGEKIEDLREFNAKEFIEALFVHEEE

SEQ ID NO: 11095 - protein, 393 aa, Haemophilus influenzae
MENVVIVSAVRTPIGSFNGALSSVSAVDLGAIVIQEAIKRANIESALVNEVIMGNVLQAGLGQNPARQAALKAGIEKEIPSLTINKVCGSGLKSVALGAQSIISGDADIVVVGGMENMSQAPYLLDSKVRQGVKMGNLTLRDTMIEDGLTCASNHYHMGITAENIAEQYGISRQAQDELALRSQTLASQAVQLGVFDKEIVPVMVKTRKGDIIVSRDEYPKADTTAEGLAKLKPAFKKEGTVTAGNASGINDGAAALILVSESKAHALGLKAIAKIRSYASGGVDPSVMGLGPVPATQKALKKAGINLDDIDLIEANEAFASQFLGVGKDLNLDMNKTNIHGGAIALGHPIGASGARILVTLLHNLIEKDKKLGLATLCIGGGQGISMIVERL

SEQ ID NO: 11096 - protein, 118 aa, Haemophilus influenzae
MLVFLLAKFYWSSGLMQNQRIRIRLKAFDHRLIDQSTAEIVETAKRTGAQVRGPIPLPTRKERFTVLISPHVNKDARDQYEIRTHKRLVDIVEPTEKTVDALMRLDLAAGVDVQISLG

SEQ ID NO: 11097 - protein, 208 aa, Haemophilus influenzae
MIGLVGRKVGMTRIFNEDGVSVPVTVIEIEANRVTQVKTLENDGYTAVQVTTGSKKANRVTKPEAGHFVKAGVEAGRGLWEFRTEGEEFTLGQEINVDIFADVKKVDVTGTSKGKGFQGGVKRWNFRTQDATHGNSLSHRVLGSIGQNQTPGRVFKGKKMAGHLGAERVTVQSLEVVRVDAERKLLLVKGSVPGAINGDVIVKPAVKA

SEQ ID NO: 11098 - protein, 200 aa, Haemophilus influenzae
MELQVVGANALTVSETTFGREFNEALIHQVVVAYAAGARQGTRAQKTRAEVSGSGKKPWRQKGTGRARAGDIKSPIWRSGGTTFAAKPQDHSQKVNKKMYRGAIKSILSELVRQDRLVVVEKFELDAPKTKVLVQKLKDLAVEDALIITASLDENLFLAARNLYKVDVRDVQGIDPVSLIAFDKVIVTVDAVKQIEEILA

SEQ ID NO: 11099 - protein, 99 aa, Haemophilus influenzae
MSQERLLSVLRAPHISEKATNNAEKSNTVVLKVALDANKAEIAAAVAQLFEVKVDSVRTVVVKGKTKRRGNKMGRRSDWKKAYVTLAEGQNLDFVDSAE

SEQ ID NO: 11100 - protein, 273 aa, Haemophilus influenzae
MAIVKCKPTSAGRRHVVKIVNPELHKGKPYAPLLDTKSKTGGRNNYGRITTRHIGGGHKQHYRLIDFKRNKLDIPAVVERLEYDPNRSANIALVLYKDGERRYILAPKGLSVGDQIQAGINSPIKVGNSLPMRNIPVGSTVHNVELKPGKGGQIARSAGAYVQIIAREGNYVTLRLRSGEMRKVLAECVATIGEVGNSEHMLRVLGKAGANRWRGIRPTVRGTAMNPVDHPHGGGEGRNFGKHPVTPWGVQTKGKKTRHNKRTDKYIVRRRGK

SEQ ID NO: 11101 - protein, 91 aa, Haemophilus influenzae
MPRSLKKGPFLDLHLLKKVEKAVESGDKKPIKTWSRRSMIIPSMIGLTIAVHNGRQHVPVYVSDEMIGHKLGEFAPTRTYRGHAADKKAKK

SEQ ID NO: 11102 - protein, 110 aa, Haemophilus influenzae
METIAKHRYARTSAQKARLVADLIRGKKVAQALEILTFTNKKAAALVKKVLESAIANAEHNDGADIDDLKVAKIFVDEGPSMKRVMPRAKGRADRILKRTSHITVVVSDR

SEQ ID NO: 11103 - protein, 235 aa, Haemophilus influenzae
MGQKVHPHGIRLGIVKPWSSTWFANTQDFADNLEGDFKVRKFLNKELASASVSRITIERPAKSIRVTIHTARPGIVIGKKGEDVEKLRNAVSKIAGVPAQINIAEVKKPELDAKLVADSIASQLERRVMFRRAMKRAVQSAMRLGAKGIKVEVSGRLGGAEIARSEWYREGRVPLHTLRADIDYNTAEAHTTYGVIGVKVWIFKGEILGGMAAVAQSEQQPADKPKKAPRGKGRK

SEQ ID NO: 11104 - protein, 136 aa, Haemophilus influenzae
MLQPKRTKFRKVHKGRNRGIASGTEVSFGTYGLKAVGRCRLTARQIEAARRAMSRAVKRQGKIWIRVFPDKPITEKPLEVRMGKGKGNVEYWVALIQPGKVLYEMDGVSEEVARNAFALAAAKLPVKTTFVTKTVM

SEQ ID NO: 11105 - protein, 63 aa, Haemophilus influenzae
MKAQDLRTKSVEELNAELVNLLGEQFKLRMQTATGQLQQTHQAKQVRRDIARVKTVLTEKAGE

SEQ ID NO: 11106 - protein, 85 aa, Haemophilus influenzae
MTDKIRSVQGKVVSDKMEKSFVVAIERKVKHPLYGKFIRRTTKLHVHDENNEAKVGDTVEIRECRPLSKTKSWTLVRVVEKAVIA

SEQ ID NO: 11107 - protein, 123 aa, Haemophilus influenzae
MIQEQTMLDVADNSGARSVMCIKVLGGSHRRYAAIGDIIKITVKEAIPRGKVKKGDVLKAVVVRTKKGVRRPDGSVIRFDGNACVILNNNTEQPIGTRIFGPVTRELRSEKFMKIISLAPEVL

SEQ ID NO: 11108 - protein, 103 aa, Haemophilus influenzae
MPAKIRQNDEVIVLTGKDKGKRGKVTKVLPNGKVFVEGINIITKHEKPVPALGKAGGLVKKEAAIDASNVAIFNPKTNKADRVGFRFEDGKKVRFFKSNNEII

SEQ ID NO: 11109 - protein, 179 aa, Haemophilus influenzae
MAKLHDYYRDQVVSELKNKFGYKSVMQVPRIEKITLNMGVGEALTDKKLLDNAVADLAAISGQKPLVTKARKSVAGFKIRQGYPIGCKVTLRGERMWEFFERLITIAVPRIRDFRGLSAKSFDGRGNYSMGVREQIIFPEIDYDKVDRVRGLDITITTTAKNDEEGQALLAAFNFPFRK

SEQ ID NO: 11110 - protein, 101 aa, Haemophilus influenzae
MAKQSMKARDVKRVKLAEKFYAKRVELKKIISDVNASDEDRWDAVLKLQTLPRDSSPSRQRNRCRQTGRPHGVLRKFGLSRIKVREAAMRGEIPGLKKASW

SEQ ID NO: 11111 - protein, 130 aa, Haemophilus influenzae
MSMQDPIADMLTRIRNGQAANKVAINMPSSKLKVAIANVLAAEGYIESVKVLEGAKPELEITLKYFQGKPVVESIQRVSRPGLRIYKRKDELPKVMGGLGVAVISTSKGVMTDRAARQAGLGGEIICYVA

SEQ ID NO: 11112 - protein, 177 aa, Haemophilus influenzae
MSRVAKAPVNIPAGVEVKLDGQLLTVKGKNGELSRKIHESVEVKQDNGQFTFTPREGFVEANAQSGTARALVNAMVIGVTEGFTKKLVLVGVGYRAQLKGNAIALSLGYSHPVEHTLPVGITAECPSQTEIVLKGADKQLIGQVAADIRAYRRPEPYKGKGVRYADEVVRIKEAKKK

SEQ ID NO: 11113 - protein, 117 aa, Haemophilus influenzae
MDKKSARIRRAARARHMMREQGVTRLVIHRTPRHIYAQVIAPNGSEVLAAASTVEKAIREQVKYTGNKDAAAAVGKAVAERALAKGVQAVAFDRSGFKYHGRVQTLADAAREAGLQF

SEQ ID NO: 11114 - protein, 166 aa, Haemophilus influenzae
MSNIEKQVGELQEKLIAVNRVSKTVKGGRIMSFTALTVVGDGNGRVGFGYGKAREVPAAIQKAMEKARRNMINVALNEGTLQHPVKGVHTGSRVFMQPASEGTGIIAGGAMRAVLEVAGVRNVLSKAYGSTNPINVVRATIDALANMKSPEMVAAKRGKTVDEILG

SEQ ID NO: 11115 - protein, 59 aa, Haemophilus influenzae
MAKTIKVTQVRSSIARLPKHKATLRGLGLRHIHHTVELIDTPAVRGMINQVSYMVKVEE

SEQ ID NO: 11116 - protein, 144 aa, Haemophilus influenzae
MRLNTLSPAEGAKHSAKRLGRGIGSGLGKTGGRGHKGQKSRTGGGVRRGFEGGQMPLYRRLPKFGFTSMKSAVTAEVRLNELTKVEGNVVTLETLKAANILTKDIQFAKVILAGEVKSAVTVRGLRVTKGAKAAIEAAGGSIEE

SEQ ID NO: 11117 - protein, 37 aa, Haemophilus influenzae
MKVRASVKKMCRNCKIVKREGVVRVLCSDPKHKQRQG

SEQ ID NO: 11118 - protein, 441 aa, Haemophilus influenzae
MAKQPGYQARSTNSGKGELKSRLLFVLGALIVYRIGSFIPVPGIDAAVLAQLVEQQKGTIIDMFNMFSGGALSRASILALGIMPYISASIVIQLLATVSPALAELKKEGAAGQRKISKYTRYATVVFATIQAVAISTGLPNMLSGLVPNVGFSFYFTSVVSLVTGTMFLMWLGEQITERGIGNGISILVFGGIVAGLPSAILQTIEQARQGQMHPLVLLLIAAIVFAVTYFVVFVERGQRRIRVEYAKRQQGRQILGGHSTHLPLKVNMANVMPAIFASSIILFPATLTQWFGQNDKFEWLNNLSMLLNPGQPLYLLVYAVAIIFFSFFYTAMQYNPRDTADNLKKSGAFIPGIRPGEQTSRYIDKVMTRLTLIGGLYVTFVCLVPYIMTSAWDVKFYFGGTSLLIVVVVIMDFIVQVQSHLMSSQYESALKKANLKGFGQ

SEQ ID NO: 11119 - protein, 122 aa, Haemophilus influenzae
MARIAGINIPDHKHAVIALTAIYGIGKTRSQAICAAAGIAEDVKIRELSEEQIDKLRDEVGKFTVEGDLRREVTLNIKRLLDLGCYRGLRHRRSLPVRGQRTKTNARTRKVHVSRSKNSRGK

SEQ ID NO: 11120 - protein, 129 aa, Haemophilus influenzae
MAKTPVRARKRVKKQVVDGVRHIHASFNNTIVTITDRQGNALAWATAGGSGFRGSRKSTPFAAQVAAERCAEIVKEFGLKNLEVMVKGPGPGRESTIRALNAAGFRITNITDVTPIPHNGCRPPKKRRV

SEQ ID NO: 11121 - protein, 206 aa, Haemophilus influenzae
MARYLGPKLKLSRREGTDLFLKSGVRAIDSKCKIDTAPGQHGARKPRLSDYGSQLREKQKVRRIYGILERQFRNYYKEANRLKGNTGENLLVLLEGRLDNVVYRMGFATTRAEARQLVSHKAIVVNGRVVNIPSFQVSVNDVVAIREKSKKQARIKASLELAEQREKPTWLEVDSAKMEGVFKRVPERSDLSADINEHLIVELYSK

SEQ ID NO: 11122 - protein, 328 aa, Haemophilus influenzae
  VARIANT (1)...(328): Xaa = Any Amino Acid
MQGSVTEFLKPRLVDIEQISSTHAKVILEPLERGFGHTLGNALRRILLSSMPGCAVTEVEIDGVLHEYSSKEGVQEDILEVLLNLKGLAVKVQNKDDVILTLNKSGIGPVVAADITYDGDVEIVNPDHVICHLTDENASISMRIRVQRGRGYVPASSRTHTQEERPIGRLLVDACYSPVERIAYNVEAARVEQRTDLDKLVIELETNGALEPEEAIRRAATILAEQLDAFVDLRDVRQPEIKEEKPEFXPILLRPVDDLELTVRSANCLKAETIHYIGDLVQRTEVELLKTPNLGKKSLTEIKDVLASRGLSLGMRLENWPPASIAED

SEQ ID NO: 11123 - protein, 128 aa, Haemophilus influenzae
MRHRKSGRQLNRNSSHRQAMFRNLASALVSHEIIKTTLPKAKELRRVVEPLITLAKVDSVANRRLAFARTRNVETVAKLFNELGPRFAQRAGGYTRILKCGFRAGDNAPMAYIELVDRPEVAEATTEE

SEQ ID NO: 11124 - protein, 185 aa, Haemophilus influenzae
MLNQIKKDAQDRMEKSLEALKGHISKIRTGRAQPSLLDAIQVEYYGAATPLRQLANVVAEDARTLAVTVFDRSLISAVEKAILTSDLGLNPSSAGTTIRVPLPPLTEERRRDLIKIVKGEGEQGKVAVRNVRRDANDKIKALLKDKEISENEQHKAEEEIQKITDIYIKKVDEVLADKEKELMDF

SEQ ID NO: 11125 - protein, 538 aa, Haemophilus influenzae
MTDLNKVVKELEALGIYDVKEVVYNPSYEQLFEEETKPGLEGFEKGTLTTTGAVAVDTGIFTGRSPKDKYIVLDEKTKDTVWWTSETAKNDNKPMNQATWQSLKDLVTNQLSRKRLFVVDGFCGASEHDRIAVRIVTEVAWQAHFVKNMFIRPTEEQLKNFEPDFVVMNGSKVTNPNWKEQGLNSENFVAFNLTERIQLIGGTWYGGEMKKGMSSMMNYFLPLKGVGAMHCSANVGKDGDVAIFFGLSGTGKTTLSTDPKRELIGDDEHGWDDVGIFNFEGGCYAKTIHLSEENEPDIYRAIRRDALLENVVVRSDGSVDFDDGSKTENTRVSYPIYHIDNIVKPVSRAGHATKVIFLTADAFGVLPPVSKLTPEQTKYYFLSGFTAKLAGTERGITEPTPTFSACFGAAFLTLHPTQYAEVLVKRMQAAGAEAYLVNTGWNGTGKRISIKDTRGIIDAILDGSIEKAEMGELPIFNLAIPKALPGVDSAILDPRDTYADKAQWQSKAEDLAGRFVKNFVKYATNEEGKALIAAGPKA

SEQ ID NO: 11126 - protein, 293 aa, Haemophilus influenzae
MTNQQDYTQDNDKLYRYLFQHRAVRGEWVRLNKTFTDTLNTHQYPKAVQDLLGEMMVATNLLTATLKFAGNITVQIQGDGPLRLALVNGNDQQQIRALARVDGNITENMSLHNMIGKGVLVITIAPKEGERYQGVISLDKPTITECLEDYFVRSEQLQTQLIIRTGEYEGKPVAAGMLLQIMPDGSGTPEDFEHLTTLAATVKDEELFGLPAEELLYRLYHEETVNLYPAQDVQFFCGCSAERSSSALLLISDEEIDEILAEHKGRIDMQCECCGTHYFFNKEAIEKLKSTRV

SEQ ID NO: 11127 - protein, 874 aa, Haemophilus influenzae
MKTTAEIRQSFLDFFHSKGHQVVESSSLVPENDPTLLFTNAGMNQFKDVFLGMDKRPYSRATTAQRCVRPGGKHNDLENVGYTARHHTFFEMLGNFSFGDYFKQDAINFAWEYLTSPQWLGLPKEKLWVTVYETDDEAYNIWNKDVGVPAERIIRIGDNKGSPYASDNFWAMGDTGPCGPCTEIFYDHGDHIWGGPPGSPEEDGDRYIEIWNVVFMQFNRLADGTMEKLPRPSVDTGMGLERISAVLQHVNSNYEIDIFKTLIAKTAEIVGATDLTNKSLRVIADHIRSCAYLIADGVIPSNEGRGYVLRRIIRRAVRHGHLLGAKESFFYKLVPTLIDVMAEAGKDVKAKQTNVEKLLRLEEEQFARTLERGLSLLDEALSQVKDGILSGEVAFKLYDTYGFPLDLTADVCRERNITIDEQAFDRKMEAQRTRAQAASQFGVDYNSVIRVDGETKFEGYTEVESQAKITALFYDGKSVESIEAGQSAVVILENTPFYAESGGQIGDSGYLSTQSVTFNVKDTQKYGQVFGHIGELTQGSLKVGQSVNAIVDAKRRHNTSLNHSATHLLHAALRQILGLHVVQKGSLVSDKALRFDFAQPEAITKEQLSEIETLVNQKIRANFPVQTDIMDIDSAKAKGAMALFGEKYGDKVRVLTMGDFSIELCGGIHAKRTGDIGLFKIITENAVAAGIRRIEAVTGQNAIDWLHNQQRILTQSADLLKSDVNTLAEKIQQLQDKAKKVEKELQGLKEKAAMQAGSYFVKSAVKINGVSVIAQQLDGIETKSLRVMVDDLKNQLGSGVIAFASILDEKVNLVVGVTNDLTAKIKAGELVNLMAQQVGGKGGGRPDMAMAGGSQLENVTQAIKVAQDWLNKNL

SEQ ID NO: 11128 - protein, 430 aa, Haemophilus influenzae
MELAYMAKLPKEEFEERRTRVFAQMQPNSALLLFSEIEKRRNNDCTYPFRQDSYFWYLTGFNEPNAALLLLKTEQVEKAIIFLRPRDPLLETWNGRRLGVERAPQQLNVNEAYSIEEFATVLPKILKNLTALYHVPEIHTWGDTLVSESAVNFSEILDWRPMLSEMRLIKSPNEIRLMQQAGQITALGHIKAMQTTRPNRFEYEIESDILHEFNRHCARFPSYNSIVAGGSNACILHYTENDRPLNDGDLVLIDAGCEFAMYAGDITRTFPVNGKFSQPQREIYELVLKAQKRAIELLVPGNSIKQANDEVIRIKTQGLVDLGILKGDVDTLIEQQAYRQFYMHGLGHWLGLDVHDVGSYGQDKQRILEIGMVITVEPGIYISEDADVPEQYKGIGVRIEDNLLMTEYGNKILTAAVPKEIADIENLMNF

SEQ ID NO: 11129 - protein, 506 aa, Haemophilus influenzae
MTAQTQCQDSQVLLTMTNVCKSFPGVKALDNANLTVRSHSVHALMGENGAGKSTLLKCLFGIYAKDEGEILFLGEPVNFKTSKEALENGISMVHQELNLVRQTSVMDNLWLGRYPLKGPFVDHAKMYRDTKAIFDELDIDVDPKEKVAKLSVSQMQMIEIAKAFSYNAKIVIMDEPTSSLSEKEVEHLFKIIDKLKQRGCGIIYISHKMDEIFKICDEITILRDGKWINTVNVKESTMEQIVGMMVGRELTQRFPEKTNVPKEVILQVENLTAKNQPSIQDVSFELRKGEILGIAGLVGAKRTDIVEAIFGVRELIEGTIKLHGKTVKNHTALEAINNGFALVTEERRSTGIYSNLSIEFNSLISNMKSYLTPWKLLSTKKMKSDTQWVIDSMNVKTPSHRTTIGSLSGGNQQKVIIGRWLLTQPEILMLDEPTRGIDIGAKFEIYQLIQELAKKDKGIIMISSEMPELLGVTDRILVMSNGKLAGIVESAKTSQEEILQLAAKYL

SEQ ID NO: 11130 - protein, 194 aa, Haemophilus influenzae
MVQQKIANLLQGDFRYQIQYNWVSLENISPNIQLAVISSEDQRFLEHLGFDFEAIQRAIRYNEKSNKGIRGASTISQQTAKNLMLWHGQNWLRKGLEVPATMLLELTWSKKRILEVYLNIAEFGNGIFGVEAASRYYFKKSAKNLSQNEAALLAAVLPNPIIYKVNKPSLLVRKKQTWILRQMGNLGTEYLSHL

SEQ ID NO: 11131 - protein, 227 aa, Haemophilus influenzae
MSKLLLVDDDIELTELLSTLLELEGFDVETANNGLEALQKLNESYKLVLLDVMMPKLNGIETLKEIRKVSNVPVMMLTARGEDIDRVLGLELGADDCLPKPFNDRELIARIKAILRRSASPSNNISNVEILSFDGITLHFSHGIATYNEENLNLTDYEFKILCLLLKSKGNVVSREELSLEVMEKPLTPFDRSLDMHISNLRRKLPKRKNKPSWFKTLRGKGYALVT

SEQ ID NO: 11132 - protein, 585 aa, Haemophilus influenzae
MKWIKKGTFSGKQYRDDVSRKISWGHWFAFFNIIVAIFIGARYAFIIDWPDTLAGKLYFFVSLLGHFSFNVFALYLLVVFPLSFIVKNHRTFRGLTVIFSTICTTLLLFDTAVFNRFNLHLSSVVWNLLVNPENGEMSRDWQIFFAPMPIILLAQMLFSRWSWEKLRSLERQKWLKGTGIFLTTTFIATHLIYAWADAYLYRPITMQRSNFPLSYPMTARSFLEKHGFLDGEEYTQKLAQEGRLDALKIDYPKKELTYAPITHKPNILLVTVSGLRHDAISNEKMPKLAKFATSSTEFTNHYSTGNSNNAGLIGLFYGLNANYTDSILSNHTQSVLIEKLRAENYQLGLFSATNFKDSIFRQALFREIKLSSNKTNKPNNESAVKNLNDFIKAQKTDSPWFAYLDLALEAKNPSDYDRTLQDIDSLLAKALESTPLENTLVIITSEHGLTFNEMNQKERENYFGRDEIQVPLLVYWKDLPVGKQNGLSNHADIFSALMQTVFRVENPLMDYSQGRNLFDLKGDDWVLASNFRWNVVIQPDGTQYHIDRKGNYKKFDKDYIEQSSDRPPLGIFLEAFQLQNFFFEK

SEQ ID NO: 11133 - protein, 930 aa, Haemophilus influenzae
MAQIATNPLVLVDGSSYLYRAFHAFPSLTNAAGEPTSAMYGVLNMLKSLISQVQPTHIAVVFDAKGKTFRDEMFEQYKSHRPPMPDDLRKQIQPLHDMIRALGIPLLVVEGIEADDVIGTLALQASSLGKKVLISTGDKDMAQLVDDNIMLINTMNNSLLDRKGVIEKYGIPPELIIDYLALMGDSADNIPGVAGVGEKTALGLLQGIGSMAEIYANLEKVAELPIRGAKKLGEKLLAEKNNADLSYTLATIKTDVELNVTTDQLLLGESQKDQLIEYFARYEFKRWLNEVMNGADSITQTTEQPVKMNQYKATSQDQSAVENTPKIQIDRTKYETLLTQADLTRWIEKLNAAKLIAVDTETDSLDYMSANLVGISFALENGEAAYLPLQLDYLDAPKTLEKSTALAAIKPILENPNIHKIGQNIKFDESIFARHGIELQGVEFDTMLLSYTLNSTGRHNMDDLAKRYLGHETIAFESLAGKGKSQLTFNQIPLEQATEYAAEDADVTMKLQQALWLKLQEEPTLVELYKTMELPLLHVLSRMERTGVLIDSDALFMQSNEIASRLTALEKQAYALAGQPFNLASTKQLQEILFDKLELPVLQKTPKGAPSTNEEVLEELSYSHELPKILVKHRGLSKLKSTYTDKLPQMVNSQTGRVHTSYHQAVTATGRLSSSDPNLQNIPIRNEEGRHIRQAFIAREGYSIVAADYSQIELRIMAHLSGDQGLINAFSQGKDIHRSTAAEIFGVSLDEVTSEQRRNAKAINFGLIYGMSAFGLSRQLGISRADAQKYMDLYFQRYPSVQQFMTDIREKAKAQGYVETLFGRRLYLPDINSSNAMRRKGAERVAINAPMQGTAADIIKRAMIKLDEVIRHDPDIEMIMQVHDELVFEVRSEKVAFFREQIKQHMEAAAELVVPLIVEVGVGQNWDEAH

SEQ ID NO: 11134 - protein, 856 aa, Haemophilus influenzae
MNIEKFTTKFQEALSERQSLAIGKDNQFIEPVHLLTALLNQQGGSIAPILTASGVNVALLRNELKTELNKLPQVIGNGGDVQLSRQLINLLNLCDKFAQQNQDKFISSELFLFAALEERGTISDILKKCGAKKEQISQAIQHIRGGQNVNDQNAEESRQALEKYTIDLTARAESGKLDPVIGRDEEIRRAIQVLQRRTKNNPVLIGEPGVGKTAIVEGLAQRIVNGEVPEGLKNKRVLSLDMGALIAGAKYRGEFEERLKAVLNELSKEEGRVILFIDEIHTMVGAGKTDGAMDAGNLLKPSLARGELHCVGATTLDEYRQYIEKDAALERRFQKVFVDEPSVEDTIAILRGLKERYEIHHHVDITDPAIVAAATLSHRYISDRQLPDKAIDLIDEAASSIRMEIDSKPEPLDRLERRIIQLKLEQQALQKEEDEASRKRLEMLEKELAEKEREYAELEEVWKSEKATLSGSQHIKQELDTAKTELEQARRAGDLAKMSELQYGRIPDLEKQLEQAETSEGKEMTLLRYRVTDEEIAEVLSKATGIPVSKMMEGEKEKLLRMEDELHKRVIGQEEAVDAVANAIRRSRAGLSDPNRPIGSFLFLGPTGVGKTELCKTLAKFLFDSEDAMVRIDMSEFMEKHSVSRLVGAPPGYVGYEEGGYLTEAVRRRPYSVILLDEVEKAHADVFNILLQVLDDGRLTDGQGRTVDFRNTVVIMTSNLGSDLIQGNKDESYSEMKALVMSVVSQHFRPEFINRIDETVVFHPLGKENIRAIASIQLERLAKRMETRGYELVFTDALLDFIGEVGYDPIYGARPLKRAIQQEIENSLAQQILSGALLPGKVVTIDYANAEVQARQ

SEQ ID NO: 11135 - protein, 246 aa, Haemophilus influenzae
MSEQIYGIHAVNSILTHSPERLIEVFVLKGREDKRLQPLLNELYSLGIGVQFVNRQTLDKKADGEVHQGVIARVQAAKELNENDLDEILANKQNPLLLVLDGVTDPHNLGACLRTADAAGAVAVIVPKDKSAQLTSIARKVACGAAETVPLIRVTNLSRTLRDLQQNHNIWVVGTAGEATETIYQSKLTGPLALVMGAEGEGMRRLTREHCDQLISIPMAGSVSSLNVSVATGVCLFEIVRQRLGS

SEQ ID NO: 11136 - protein, 616 aa, Haemophilus influenzae
MKNEIDIKKLRNIAIIAHVDHGKTTLVDKLLQQSGTFESARGDVDERVMDSNDLEKERGITILAKNTAINWNDYRINIVDTPGHADFGGEVERVLSMVDSVLLVVDAFDGPMPQTRFVTQKAFAHGLKPIVVINKVDRPGARPDWVVDQVFDLFVNLGASDEQLDFPIIYASALNGVAGLEHEDLAEDMTPLFEAIVKHVEPPKVELDAPFQMQISQLDYNNYVGVIGIGRIKRGSIKPNQPVTIINSEGKTRQGRIGQVLGHLGLQRYEEDVAYAGDIVAITGLGELNISDTICDINTVEALPSLTVDEPTVTMFFCVNTSPFAGQEGKYVTSRQILERLNKELVHNVALRVEETPNPDEFRVSGRGELHLSVLIENMRREGYELAVSRPKVIYRDIDGKKQEPYEQVTIDVEEQHQGSVMEALGIRKGEVRDMLPDGKGRVRLEYIIPSRGLIGFRGDFMTMTSGTGLLYSSFSHYDEIKGGEIGQRKNGVLISNATGKALGYALFGLQERGKLMIDANIEVYEGQIIGIHSRSNDLTVNCLQGKKLTNMRASGKDDAIVLTTPVKFSLEQAIEFIDDDELVEVTPESIRIRKKLLTENDRKRANRTTTSTSTH

SEQ ID NO: 11137 - protein, 472 aa, Haemophilus influenzae
MPNANAIANVFKLIEENNVKFVLLRFTDIKGKEHGVSIPVSLVDEDMFEDGKMFDGSSVEGWKTINKADMLLMPMAETAIVDPFAQIPTLSIRCSVYEPTTMQSYDRDPRSIAIRAENYMRSTGIADQAFFGPEPEFFLFDDVRFNVSMNKASFSIDDIEAAWNTNKKYEEGNNAYRPLKKGGYCAVAPIDSAHDIRSEMCLILEEMGLVIEAHHHEVATAGQNEIATKFNTLTLKADETQIYKHVVQNVALEHGKTACFMPKPITGDNGSGMHCNMSLSKDGKNIFQGDKYAGLSETALYYIGGIIKHAKALNAFTNPSTNSYKRLVPGYEAPVLLAYSASNRSASIRIPAVTNPKAIRVEARFPDPLANPYLAFAALLMAGLDGVVNKIHPGDAMDKNLYDLPPEELKDIPAVASSLEEALNSLEKDYEFLTQGGVFAKDFIDAFISIKRKEVERLNMAPHPVEFEMYYA

SEQ ID NO: 11138 - protein, 471 aa, Haemophilus influenzae
MNRLFFSKIALWLLDFLTFNISFLLSLFVISYYHNGYEKYLPIYEIDDRTYIHAVLAGICVGWFAIRLRHYTYRKPFWFELKEIFRTLIIFAIFELAIVAFPKLYFSRYLWALTWGITFLLFPLARVLVKKFLIKSGWFLRDTIMIGSGDNAFDVYNALRDEPYLGFQVTHFISVSNISNNVKELNIPILNSMSSWTSVTKKTDQFIIALEDDEEVDRNNWLRYFSTNGYRSVSVIPTLRGLPLYNTDMSFMFSHEIMLLQMNNNLAKLSSRILKRTMDIVVGSLAIIIFSPVLLYLYFAVKKDGGNAIYGHPRIGRNGKTFNCLKFRTMAVNSKEVLDELLRTDPEARAEWEKDFKLKNDPRITKIGAFIRKTSLDELPQLFNVLKGEMSLVGPRPIVIDELERYEENVDYYLMARPGMTGLWQVSGRNNIDYNTRVYFDSWYVKNWSLWNDIAILFKTMNVVLNRDGAY

SEQ ID NO: 11139 - protein, 390 aa, Haemophilus influenzae
MKFIDESLIRIEAGDGGNGCVSFRREKFIPKGGPDGGDGGDGGDVYLQADENLNTLIDYRFNKRFAAERGENGRSSDCTGRRGKDIILPVPVGTRAIDNDTKETLGDLTQHGQKMLVAKGGYHGLGNTRFKSSVNRAPRQKTMGTPGEKRDLLLELMLLADVGMLGLPNAGKSTFIRAVSAAKPKVADYPFTTLVPSLGVVKVDDSHSFVVADIPGLIEGAADGAGLGIRFLKHLERCRVLIHLVDIAPIDGSNPADNMAIIESELFQYSEKLSEKPRWLVFNKIDTMSDEEAEERAREIAEQLGWEEDYYFISAATGKNVSPLCRDIMDFIIANPREAETQQVAPEEVKFKWEDYHQERLAEHQFDDDEDWDDDWSEEDDEGIEFIYKP

SEQ ID NO: 11140 - protein, 85 aa, Haemophilus influenzae
MATKKAGGSTRNGRDSEAKRLGVKRFGGESVLAGSIIVRQRGTKFHAGNNVGMGRDHTLFATADGKVKFEVKGEKSRKYVVIVTE

SEQ ID NO: 11141 - protein, 103 aa, Haemophilus influenzae
  VARIANT (1)...(103): Xaa = Any Amino Acid
MYAVFQSGGKQHRVSEGQVVRLEKLELATGATVEFDSXLMVVNGEDVKIGAPVVAGAKVVAEVVAQGRGEKVKIVKFRRRKHSRKQQGHRQWFTEVKITGIQA

SEQ ID NO: 11142 - protein, 329 aa, Haemophilus influenzae
MKKQDLMSIDEIQKLADPDMQKVNQNILAQLNSDVPLIGQLGFYIVQGGGKRIRPLIAVLAARSLGFEGSNSITCATFVEFIHTASLLHDDVVDESDMRRGRATANAEFGNAASVLVGDFIYTRAFQLVAQLESLKILSIMADATNVLAEGEVQQLMNVNDPETSEANYMRVIYSKTARLFEVAGQAAAIVAGGTEAQEKALQDYGRYLGTAFQLVDDVLDYSANTQALGKNVGDDLAEGKPTLPLLHAMRHGNAQQAALIREAIEQGGKREAIDEVLAIMTEHKSLDYAMNRAKEEAQKAVDAIEILPESEYKQALISLAYLSVDRNY

SEQ ID NO: 11143 - protein, 236 aa, Haemophilus influenzae
MTTPKILVVEDEIVTRNTLKGIFEAEGYDVFEAENGVEMHHILANHNINLVVMDINLPGKNGLLLARELREELSLPLIFLTGRDNEVDKILGLEIGADDYLTKPFNPRELTIRARNLLHRAMPHQEKENTFGREFYRFNGWKLDLNSHSLITPEGQEFKLPRSEFRAMLHFCENPGKLQTREELLKKMTGRELKPQDRTVDVTIRRIRKHFEDHPNTPNIIMTIHGEGYRFCGDIE

SEQ ID NO: 11144 - protein, 421 aa, Haemophilus influenzae
MFTRNMTIADYDPVLWQAIQDENRRQEEHIELIASENYASPRVMEAQGSQFTNKYAEGYPGKRYYGGCEYADIVEQLAIDRAKELFGADYVNVQPHSGSQANAAVYGALINAGDTILGMDLAHGGHLTHGAKVSFSGKIYNSVLYGITADGLIDYEDVRQKALECKPKLIVAGFSAYSQVVDWAKMREIADEVGAYLFVDMAHVAGLIAAGLYPNPLPHAHVVTTTTHKTLGGPRGGLILSSCGDEEIYKKLQSSVFPANQGGPLVHIIAAKAVCFKGALEPQYKEYQANVIKNAKAMVEVFKQRGYDVVSNGTENHLFLVSFIKQGLTGKAADAALGKANITVNKNAVPNDPQKPFVTSGIRVGTPSVTRRGFNENDVRELAGWMCDVLDALGKENEEQVIAETKEKVLAICKRLPVYPK

SEQ ID NO: 11145 - protein, 1032 aa, Haemophilus influenzae
MYEEIRMKFTDIFIRRPVLAVSISLLMIILGLQAISKLAVREYPKMTTTVITVSTAYPGADANLIQAFVTSKLEESIAQADNIDYMSSTSAPSSSTITIKMKLNTDPAGALADVLAKVNAVKSALPNGIEDPSVSSSSGGSGIMYISFRSKKLDSSQVTDYINRVVKPQFFTIEGVAEVQVFGAAEYALRIWLDPQKMAAQNLSVPTVMSALSANNVQTAAGNDNGYYVSYRNKVETTTKSVEQLSNLIISSNGDDLVRLRDIATVELNKENDNSRATANGAESVVLAINPTSTANPLTVAEKIRPLYESIKTQLPDSMESDILYDRTIAINSSIHEVIKTIGEATLIVLVVILMFIGSFRAILIPILAIPISLIGVLMLLQSFNFSINLMTLLALILAIGLVVDDAIVVLENIDRHIKAGETPFRAAIIGTREIAVPVISMTIALIAVYSPMALMGGITGTLFKEFALTLAGAVFISGVVALTLSPMMSSKLLKSNAKPTWMEERVEHTLGKVNRVYEYMLDLVMLNRKSMLAFAVVIFSTLPFLFNSLSSELTPNEDKGAFIAIGNAPSSVNVDYIQNAMQPYMKNVMETPEVSFGMSIAGAPTSNSSLNIITLKDWKERSRKQSAIMNEINEKAKSIPEVSVSAFNIPEIDTGEQGPPVSIVLKTAQDYKSLANTAEKFLSAMKASGKFIYTNLDLTYDTAQMTISVDKEKAGTYGITMQQISNTLGSFLSGATVTRVDVDGRAYKVISQVKRDDRLSPESFQNYYLTASNGQSVPLSSVISMKLETQPTSLPRFSQLNSAEISAVPMPGISSGDAIAWLQQQATDNLPQGYTFDFKSEARQLVQEGNALAVTFALAVIIIFLVLAIQFESIRDPMVIMISVPLAVSGALVSLNILSFFSIAGTTLNIYSQVGLITLVGLITKHGILMCEVAKEEQLNHGKTRIEAITHAAKVRLRPILMTTAAMVAGLIPLLYATGAGAVSRFSIGIVIVAGLSIGTIFTLFVLPVVYSYVATEHKPLPVFDENKTTH

SEQ ID NO: 11146 - protein, 390 aa, Haemophilus influenzae
MTQIATENPSTKSVSNKTDRKKGLSIFILLLLIIGIACALYWFFFLKDFEETEDAYVGGNQVMVSSQVAGNVAKINADNMDKVHAGDILVELDDTNAKLSFEQAKSNLANAVRQVEQLGFTVQQLQSAVHANEISLAQAQGNLARRVQLEKMGAIDKESFQHAKEAVELAKANLNASKNQLAANQALLRNVPLREQPQIQNAINSLKQAWLNLQRTKIRSPIDGYVARRNVQVGQAVSVGGALMAVVSNEQMWLEANFKETQLTNMRIGQPVKIHFDLYGKNKEFDGVINGIEMGTGNAFSLLPSQNATGNWIKVVQRVPVRIKLDPQQFTETPLRIGLSATAKVRISDSSGAMLREKTEPKTLFSTDTLKYDESAVENLIESIIQQNSH

SEQ ID NO: 11147 - protein, 160 aa, Haemophilus influenzae
MTFSLIVATTLNNVIGKDNQMPWHLPADLAWFRQNTTGKPVIMGRKTFESIGRPLPKRTNIVLSRQLFEHEGVIWKDSFESAVNFVRDFDEIMLIGGGELFKQYLPKADKLYLTQIQTELDGDTFFPQLNWEEWEIEFDEYRKADEQNRYDCRFLILTRK

SEQ ID NO: 11148 - protein, 901 aa, Haemophilus influenzae
MSILTRIFGSRNERVLRKLKKQVVKINKMEPAFEALSDDELKAKTQEFRDRLSGGETLQQILPEAFATVREASKRVLGMRHFDVQLIGGMVLTNRCIAEMRTGEGKTLTATLPCYLIALEGKGVHVVTVNDYLARRDAETNRPLFEFLGMSVGVNIPGLSPEEKRAAYAADITYATNSELGFDYLRDNLAHSKEERFQRTLGYALVDEVDSILIDEARTPLIISGQAENSSELYIAVNKLIPSLIKQEKEDTEEYQGEGDFTLDLKSKQAHLTERGQEKVEDWLIAQGLMPEGDSLYSPSRIVLLHHVMAALRAHTLFEKDVDYIVKDGEIVIVDEHTGRTMAGRRWSDGLHQAIEAKEGVDVKSENQTVASISYQNYFRLYERLAGMTGTADTEAFEFQQIYGLETVVIPTNRPMIRDDRTDVMFENEQYKFNAIIEDIKDCVERQQPVLVGTISVEKSEELSKALDKAGIKHNVLNAKFHQQEAEIVAEAGFPSAVTIATNMAGRGTDIILGGNWKAQAAKLENPTQEQIEALKAEWEKNHEIVMKAGGLHIIGTERHESRRIDNQLRGRSGRQGDPGSSRFYLSLEDGLMRIYLNEGKLNLMRKAFTVAGEAMESKMLAKVIASAQAKVEAFHFDGRKNLLEYDDVANDQRHAIYEQRNHLLDNDDISETINAIRHDVFNGVIDQYIPPQSLEEQWDIKGLEERLSQEFGMELPISNWLEEDNNLHEESLRERIVEIAEKEYKEKEALVGEDAMRHFEKGVMLQTLDELWKEHLASMDYLRQGIHLRGYAQKDPKQEYKKESFRMFTEMLDSLKHQVITALTRVRVRTQEEMEEAERARQEMAARINQNNLPVDENSQTTQNSETEDYSDRRIGRNEPCPCGSGKKYKHCHGSRVARQ

SEQ ID NO: 11149 - protein, 251 aa, Haemophilus influenzae
MEAQPQQKENIMAQVSMRDMINAGVHFGHQTRYWNPQMKPFIFGARNGVHIINLEKTLPLFNEALAELTRIASNNGKVLFVGTKRAASEAVQAAALDCQQYYVNHRWLGGMLTNWKTVRQSIKRLKDLETQSQDGTFDKLTKKEALMRSREMEKLELSLGGIKDMGGLPDALFVIGADHEHIAVKEANNLGIPVFAIVDTNSTPAGVDFVIPGNDDATRAIQLYVSAAAAAVKEGRGNEAQVAEELAADAE

SEQ ID NO: 11150 - protein, 283 aa, Haemophilus influenzae
MAEITASLVKELRDRTGAGMMECKKALVEANGDIELAIDNMRKSGQAKAAKKAGRVAAEGVILARVENGFGVLVEMNCETDFVAKDAGFLGLANEVTDFAAANKGTTIEALQAQFEEKRAALVAKIGENMNIRRVAYLDGQVIAQYLHGAKIGVLVAGEGSADELKKVAMHVAASKPEFVNPEDVSAEVVEHERQIQIDIAINSGKPKEIAEKMVEGRMKKFTGEVSLTGQAFVMDPSVSVGDFLKSVNTSVSNFIRLEVGEGIEKKEEDFAAEVAKITGGNA

SEQ ID NO: 11151 - protein, 239 aa, Haemophilus influenzae
MIELDQTNIPKHVAIIMDGNGRWAKQKNKMRIFGHTNGVTAVRKAVAYARQIGVEVLTLYAFSSENWSRPEQEISALMSLFMQALDREVKKLHKNNICLKIIGDVSRFSETLQEKIKKAENLTEKNTALTLNIAANYGGCWDIIQAAKQIAEKVKKEEMSVSDINNSTFQHHLATQNAPPVDLLIRTSGEQRISNFLLWQIAYAELYFSDVLWPDFNQLEFNRAIASYQQRHRRFGGTE

SEQ ID NO: 11152 - protein, 861 aa, Haemophilus influenzae
MQEQYRPDMIEPKVQQYWAENKVFKAIKDESKEKYYCLSMFPYPSGRLHMGHVRNYTIGDVISRYQRMLGKNVLQPFGWDAFGLPAEGAAIKNKTAPAKWTYENIAYMKKQLQLLGFGFDWDREIATCKPEYYKWEQWFFTELYKKGLVYKKTSTVNWCPNDETVLANEQVHEGCCWRCDTPVEQKEIPQWFIKITDYAEQLLGGLDTLPQWPDMVKTMQRNWIGRSEGVEITFDVANTNEKVAVYTTRPDTFYGVSYLGIAAAHPLASLAAQNNSELAAFIQEAKNAKVAEADLATMEKKGMATGLFAIHPLTGDKLPIWVANFVLMHYGTGAVMAVPAHDQRDFEFAQKYSLPIKQVIAPLADEEIDLTKQAFVEHGKLVNSDEFDGKNFDGAFNGIADKLEKLGVGKRQVNYRLRDWGVSRQRYWGAPIPMLTLENGDVVPAPMEDLPIILPEDVVMDGVKSPINADPNWAKTTFNDAPALKETDTFDTFMESSWYYARYTCPQYQNGMLDAEEANYWLPVDQYIGGIEHATMHLLYFRFFHKLLRDAGFVTSEEPADKLLCQGMVLADAFYYTSPTNERIWVSPTQVTLERDEKGRIIKATDPEGRELVHSGMTKMSKSKNNGIDPQEMVEKYGADTVRLFMMFASPAEMTLEWQESGVEGAKRFLGRVWNLVYQYQQNPAKTSLDLTALSAEQKVLRREVHKTIAKVSDDIGRRQTFNTAIAAVMELMNKLTKASLDSEQDRAVMAEALSAVVRMLYPITPHICFELWQALGNESAIDTAEWVKADEAAMVEDEKLIVVQVNGKVRGKVTVATDADEDTVKTIAFADENVKKFIDNQHIVKVIYVVGKLLNVVVKP

SEQ ID NO: 11153 - protein, 302 aa, Haemophilus influenzae
MSTKFNVKTFQGMILALQEYWANQGCTIVQPFDMEVGAGTSHPMTALRALGPEPMAFAYVQPSRRPTDGRYGENPNRLQHYYQFQVVIKPSPDNIQELYLGSLEMLGFDPTKNDIRFVEDNWENPTLGAWGLGWEVWLNGMEVTQFTYFQQVGGLECKPVTGEVTYGLERLAMYIQGVDSVYDLVWSDGPLGKTTYGDVFHQNEVEQSTYNFEHANTDFLFYCFDQYEKEAQELLALEKPLPLPAYERILKAAHSFNLLDARKAISVTERQRYILRIRALTKGVAEAYYASREALGFPGCKK

SEQ ID NO: 11154 - protein, 436 aa, Haemophilus influenzae
  VARIANT (1)...(436): Xaa = Any Amino Acid
MAKIVKVIGREIIDSRGNPTVEAEVHLXGGFVGLAAAPSGASTGSREALELRDGDKSRFLGKGVLKAVAAVNNEIAQAIVGKDATNQAEIDQIMIDLDGTENKSNFGANAILAVSLANAKAAAASKGLPLYAYIAELNGTAGVYSMPLPMMNIINGGEHADNNVDIQEFMIQPVGAKTLREALRIGAEVFHNLAKVLKAKGMSTAVGDEGGFAPNLASNADALACIKEAVEKAGYVLGKDVTLAMDCASSEFYNKENGMYEMKGEGKSFTSQEFTHYLEELCKEYPIVSIEDGQDESDWEGFAYQTKVLGDRVQLVGDDLFVTNTKILKEGIEKGIANSILIKFNQIGSLTETLAAIKMAKDAGYTAVISHRSGETEDATIADLAVGTAAGQIKTGSMSRSDRIAKYNQLIRIEEALERAGTPAAFPGLKAVKGQA

SEQ ID NO: 11155 - protein, 401 aa, Haemophilus influenzae
MSQYSENIIIGAGAAGLFCAAQLAKLGKSVTVFDNGKKIGRKILMSGGGFCNFTNLEVTPAHYLSQNPHFVKSALARYTNWDFISLVAEQGITYHEKELGQLFCDEGAEQIVEMLKSECDKYGAKILLRSEVSQVERIQNDEKVRFVLQVNSTQWQCKNLIVATGGLSMPGLGATPFGYQIAEQFGIPVIPPRASLVPFTYRETDKFLTALSGISLPVTITALCGKSFYNQLLFTHRGISGPAVLQISNYWQPTESVEIDLLPNHNVEEEINQAKQSSPKQMLKTILVRLLPKKLVELWIEQGIVQDEVIANISKVRVKNLVDFIHHWEFTPNGTEGYRTAEVTMGGVDTKVISSKTMESNQVSGLYFIGEVLDVTGWLGGYNFQWAWSSAYACALSISRQ

SEQ ID NO: 11156 - protein, 372 aa, Haemophilus influenzae
MLEFSSQDCVFMQRALDLAAKGQYTTTPNPSVGCVLVKNGEIVGEGFHFKAGQPHAERVALAQAGENAKGATAYVTLEPCAHYGRTPPCALGLIEAGVVKVIAAMQDPNPQVAGKGLKMLSDAGIESTVNLLNDQAEKINKGFLKRMRQGMPFVQLKLAMSLDGRTAMASGESKWITGPDARSDVQKMRAKSSALLSTSTTVIADDPSLNVRWDEFPENLKTEYKKEWLRQPVRVILDSQHRIQPTHKLFLTHSPVWLVSSEPRDLTGFPDFCEQIIFPKENLLKELMRELGKRQINTLWVEAGANLSGSLIDAKLVDELIIYIAPKLLGDNARGLCQLPNLTKLADAPLWQLNELEQIGDDIKLTYTPKGV

SEQ ID NO: 11157 - protein, 454 aa, Haemophilus influenzae
MTMITPVQAILASNQHFLDRQDVMESNVRSYPRKLPFAYAKAQGCWVTDVEGNEYLDFLAGAGTLALGHNHPILMQAIKDVLDSGLPLHTLDLTTPLKDAFSEELLSFFPKDKYILQFTGPSGADANEAAIKLAKTYTGRGNIIAFSGGFHGMTQGALALTGNLGAKNAVENLMPGVQFMPYPHEYRCPFGIGGEAGAKAVEQYFENFIEDVESGVVKPAAVILEAIQGEGGVVSAPISFLQKVREVTQKHGILMIVDEVQAGFCRSGRMFAFEHAGIEPDIIVMSKAVGGSLPLAVLAIRKEFDAWQPAGHTGTFRGNQLAMATGYASLKIMRDENLAQNAQERGEYLTNALRELSKEYPCIGNVRGRGLMMGIDIVDERQSKDATGAYPRDCELAAAIQKACFKNKLLLERGGRGGNVVRVLCAVNINQSECEEFIKRFKQSVVDALKVVRS

SEQ ID NO: 11158 - protein, 78 aa, Haemophilus influenzae
MSRVCQVTGKRPAVGNNRSHAMNATRRRFLPNLHTHRFWVESENRFVTLRLTAKGMRIIDKKGIDAVLAEIRARGEKI

SEQ ID NO: 11159 - protein, 155 aa, Haemophilus influenzae
MDIRKIKKLIELVEESGITELEVQEEEGTVRISRAAPVIAPAAVQYAAAPVVAPTPAAAPAQVPAAATTAPAASDELSGHLVRSPMVGTFYRSPSPEAKAFVEVGQSVKVGDALCIVEAMKMMNRIEADKAGVVKAILINDGNAVEFDEPLIVIE

SEQ ID NO: 11160 - protein, 448 aa, Haemophilus influenzae
MLEKVVIANRGEIALRILRACKELGIKTVAVHSTADRDLKHVLLADETICIGPAPSAKSYLNIPAIIAAAEVTGADAIHPGYGFLSENADFAEQVERSGFTFIGPTADVIRLMGDKVSAIKAMKKAGVPCVPGSDGPVSNDIAKNKEIAKRIGYPIIIKASGGGGGRGMRVVRSEDALEESIAMTKAEAKAAFNNDMVYMEKYLENPRHVEIQVLADTHGNAVYLAERDCSMQRRHQKVVEEAPAPGITEEVRRDIGSRCANACVEIGYRGAGTFEFLYENGEFYFIEMNTRIQVEHPVTEMITGVDLVKEQLRIAAGLPISFKQEDIKVKGHAMECRINAEDPKTFLPSPGKVNHLHSPGGLGVRWDSHVYGGYTVPPHYDSMIAKLITYGDTREVAIRRMQNALSETIIDGIKTNIPLHELILEDENFQKGGTNIHYLEKKLGMNE

SEQ ID NO: 11161 - protein, 330 aa, Haemophilus influenzae
MRIGSYQLRNRVLLAPMAGITDQPFRRLCAYYGAGLTFSEMMSTNPQVWHTEKSKLRLAHSEDLGLNAVQIAGSDPLEMAQAAAINVEYGAQIIDINMGCPAKKVNRKLAGSALLQFPDLVEKILREVVSAVNVPVTLKIRTGWDKSNRNCVQIGKIAEQCGIQALTVHGRTRACLFEGEAEYDNIKAVKQAIAIPVIANGDIDSARKAKFVLNYTGADAIMIGRAALGNPWLFQAVENLIEHNSISQMPSLKEKCGQILRHIQELHQFYGEQKGYRIARKHVAWYLQGIQPDSVFKQTFNAISDPKEQLIVLEDFFNLILDKKNVRTTT

SEQ ID NO: 11162 - protein, 321 aa, Haemophilus influenzae
MIKKIAVLTSGGDAPGMNAAIRGVVRSALAEGLEVFGIYDGYQGLYNNKIKQLNRYSVSDVINRGGTFLGSARFPEFKDPNIRAKCAEILRSHGIDALVVIGGDGSYMGAKLLTEEHSFPCVGLPGTIDNDVAGTDYTIGYQTALQTAVDAIDRLRDTSSSHQRISIVEIMGRHCSDLTISAGIAGGCEYIVASEIEFNREELIQQIERSIIRGKRHAIIAITELLTDVHSLAKEIEARVGHETRATVLGHIQRGGSPCAFDRILASRMGAYAVDLLLQGKGGYCVGIQNEQLVHHDIIDAINNMQRVFKADWLKVAKRLE

SEQ ID NO: 11163 - protein, 358 aa, Haemophilus influenzae
MQSYNIAVLAGDGIGPEVMAEAIKVLNRVQEKFGFKLNFNEFFVGGAAIEHCGYPLPAETLKGCDQADAILFGSVGGPKWTNLPPDQQPERGALLPLRKHFKLFCNLRPATLYKGLEKFCPLRADIAAKGFDMVVVRELTGGIYFGQPKGREGDGVQTKAFDTEVYYKYEIERIARAAFEAAMKRNKKVTSVDKANVLQSSILWRETVTEMAKDYPEVTLEHIYIDNATMQLIKSPESFDVLLCSNIFGDIISDEAAMITGSMGMLPSASLNEEGFGLYEPAGGSAPDIAGKGIANPIAQILSAAMMLRYSFNLNEAADAIESAVQKVLASGHRTADLADDSTPVSTAEMGTLITQAI

SEQ ID NO: 11164 - protein, 469 aa, Haemophilus influenzae
MAKTLYEKLFDSHIVYEAEGETPILYINRHLIHEVTSPQAFDGLRVANRQVRQVNKTFGTMDHSISTQVRDVNKLEGQAKIQVLELDKNTKATGIKLFDITTKEQGIVHVMGPEQGLTLPGMTIVCGDSHTATHGAFGALAFGIGTSEVEHVLATQTLKQARAKSMKIEVRGKVASGITAKDIILAIIGKTTMAGGTGHVVEFCGEAIQDLSMEGRMTVCNMAIEMGAKAGLIAPDETTFAYLKDRPHAPKGKDWEDAVAYWKTLKSDDDAQFDTVVTLEAKDIAPQVTWGTNPGQVISVNETIPNPQEMADPVQRASAEKALHYIGLEAGTNLKDIKVDQVFIGSCTNSRIEDLRAAAAVMKGRKKADNVKRILVVPGSGLVKEQAEKEGLDKIFIAAGAEWRNPGCSMCLGMNDDRLGEWERCASTSNRNFEGRQGRNGRTHLVSPAMAAAAGVFGKFVDIRDVTLN

SEQ ID NO: 11165 - protein, 200 aa, Haemophilus influenzae
MAGFKQLSGLVVPLDAANVDTDAIIPKQFLQAITRIGFGKHLFHEWRYLDVEGTKPNPEFVLNYPQYQGATILLARKNLGCGSSREHAPWALADYGFKVMIAPSFADIFYNNSLNNHMLPIRLSEEEVEEIFQWVWANEGKQIHVDLEAMTVTVGDKVYTFELDEFRRHCLLNGLDNIGLTLQHEDKISAYEKNIPAFLR

SEQ ID NO: 11166 - protein, 366 aa, Haemophilus influenzae
MQFSISRENLLKPLQQVCGVLSNRPNIPVLNNVLLQIEDYRLTITGTDLEVELSSQTQLSSSSENGTFTIPAKKFLDICRTLSDDSEITVTFEQDRALVQSGRSRFTLATQPAEEYPNLTDWQSEVDFELPQNTLRRLIEATQFSMANQDARYFLNGMKFETEGNLLRTVATDGHRLAVCTISLEQELQNHSVILPRKGVLELVRLLETNDEPARLQIGTNNLRVHLKNTVFTSKLIDGRFPDYRRVLPRNATKIVEGNWEMLKQAFARASILSNERARSVRLSLKENQLKITASNTEHEEAEEIVDVNYNGEELEVGFNVTYILDVLNALKCNQVRMCLTDAFSSCLIENCEDSSCEYVIMPMRL

SEQ ID NO: 11167 - protein, 454 aa, Haemophilus influenzae
MNLSNLWQSCLLQLQDQVSASDLSTWLRPLQADVVADNHIVLYASNMFVKGWVETHYLAQIQQICQTLAQNPELRISLKEGVKPAPKIVESTPNTSLRSESAVDFQAESSASVKFESHLNTKHLFDNFVEGKSNQLARAVGQKLAQAPGEPSANPFFLYGGTGLGKTHLLHAIGNGILADKPNARVLYIHANNFMQHMVKAVRDNKMDQFKKFYRSLDALLVDDIQFFAEKEKTQEEFFHIFNSLFETGRQIILTSDRYPKEIEKIEERLKSRFGWGLTTAIEPPDLETRVAILLKKAEEHNMNLPEEVAFFIAQRLRTNVRELEGALNRVKAMQDFKGGDIDIDFVRDTLKDILALQERLVTIENIQKVVAEYYRIKVSDLKSKSRARSVTRPRQIAMALAKELTNRSLPEIGRAFDRDHTTVLNACREVPKFREQDNSIQEDWANLIRTLSA

SEQ ID NO: 11168 - protein, 44 aa, Haemophilus influenzae
MKRTFQPSVLKRSRTHGFRARMATKNGRQVLARRRAKGRKSLSA

SEQ ID NO: 11169 - protein, 461 aa, Haemophilus influenzae
MRLDFKEFFMKETIVAQATAPGRGGIGILRVSGPLATKVAQAILGKCPKPRMADYLPFKDADGTILDQGIALYFKSPNSFTGEDVLELQGHGGQVVLDLLLKRILQIDGIRLARPGEFSEQAFLNDKLDLAQAEAIADLIDATSEQAVRSALKSLQGEFSKKVNELVDSVIYLRTYVEASIDFPDEEIDFLADGKIEANLRGIINQLEDVRSEAKQGSILREGMKVVIAGRPNAGKSSLLNALAGREAAIVTDIAGTTRDVLREHIHIDGMPLHIIDTAGLRDAIDEVERIGISRAWTEIEQADRIILMLDSSDPESADLSKVRSEFLAKLPSTLPVTIVRNKIDLNGEQASESEQGGYQMISLSAQTHDGVQLLREHLKQAMGFQTGMEGGFLARRRHLDALDKAAEHLQIGLVQLTEFHAGELLAEELRLVQSYLSEITGQFTSDDLLGNIFSSFCIGK

SEQ ID NO: 11170 - protein, 333 aa, Haemophilus influenzae
MLAEKLQINSITPHPSVEYWSVCKVEALFETPFLELVYRATQVHRKHFNPRAIQLSTLMSIKTGGCPEDCSYCPQSARYHTGVQNQQLLDVDEIVAKAKIAKARGAGRFCMGAAWRGPKPKDIEKVTEIIKAVKSLGLETCGTFGLLQDGMAEDLKEAGLDYYNHNLDTAPEHYAEVIGTRRFDDRLSTLGKVRKAGLKVCCGGIVGMNETRKERAGLIASLANLDPQPESVPINQLVKVEGTPLADAEELDWTEFVRTIAVARITMPKSYVRLSAGRSGMTEEMQAMCFMAGANSIFYGDKLLVTDNPEEDGDQLLMAKLDLEPETAENKKL

SEQ ID NO: 11171 - protein, 665 aa, Haemophilus influenzae
MATRRQLANAIRVLAMDSVQKAKSGHPGAPMGMADIAEVLWRDFLKHNPTNPKWADRDRFVLSNGHGSMLIYSLLHLTGYDLSIEDLKQFRQLHSKTPGHPEYGYAPGVETTTGPLGQGITNAVGMAIAEKTLAGQFNREGHEIVDHHTYVFLGDGCLMEGISHEACSLAGTLGLGKLIAFYDDNNISIDGHVDGWFSDDTAERFEAYGWQVIRNVDGHDAEQIRAATILAQAEKGKPTLIICKTIIGFGSPNKSGSHDSHGAPLGDEEIDLTRKALGWEYAPFEIPAEYYAEWSAKEKGAAAEKSWEEKFAAYAKAYPELAAEFKRRVSGELPTNWAAESKAFIEKLQANPASIASRKASQNAIEAYAHVLPEFLGGSADLASSNLTLWSGSKPIRAHENVGGNYINYGVREFGMSAIMNGIALHGGFIPYGATFLMFYEYAHNAVRMAALMKQRTLFVYTHDSIGLGEDGPTHQPVEQTASLRLIPNLETWRPCDQVESAIAWQQAVERQDGPSALIFTRQNLAQMDRTSAQLDAVKRGAYVLKDCDGTPELIFIATGSEVELAVQAAEALSAEGKKVRVVSMPSTNRFDKQDAAYRESVLPAAVTKRVAIEAGIADFWYKYVGFNGRVIGMNSFGESAPADQLFKLFGFTVENVVAKAKEIL

SEQ ID NO: 11172 - protein, 298 aa, Haemophilus influenzae
MDYLDKLTHLAQVRGEINIRCEFQGEWQISHQEKDAGKGIFHLIEQGECWLTLNEKQFHLKEGDVFFLPQNQPHSMHYSANKRADIPTKKSHQGLFELHQIGRGTPDLKMFCGNFYYQQDALLTASMPEYLHINLCDTPIHPLVQLFLQEAQKNDAGTKSVVDALSNVLLIYILRHAIQQNLIEQGILFALQDKRLNTALIAILQQPQNDWHIEQLAELATMSRANFIRIFQQHIGMSPGRFLTKVRLQSAAFLLKQSQQSVLAIALEVGYQSEAHFCKVFKNYYQLSPSQYRKSVSL

SEQ ID NO: 11173 - protein, 390 aa, Haemophilus influenzae
MNKTNPTIALVAGEVSGDILGAGLIRQLKAHYPNARFIGIAGPRMLAEGCETLVDMEELSVMGLAEILKHLPRLLKIRKNVIQTMLQEKPDVYIGIDAPDFNLDVELKLKANGIKTIHYVSPSVWAWRQNRIHKIAKATHQVLAFLPFEKAFYDKFNVPCRFIGHTMADAIPLKPNRAEACQTLQIDPAQRYLAILVGSRGSEVEFLAEPFLKTALLLKEQFPDLQFLVPLVNEKRRIQFETIKAKITPNLDLHLIDGNARQAMIAADATLLASGTAALEAMLCKSPMVVGYRMKPLTYFLAKRLVKTDYISLPNLLANEMLVPEMIQEECTPELLAEKLSVYLSDDESAVKNRHVLIQHFTDLHQKIQCNADKQAAQAVIDLLEGKENV

SEQ ID NO: 11174 - protein, 148 aa, Haemophilus influenzae
MSEQQPKVIESKEIMTLLPHRYPFLLVDRVLDFKEGEWLKAIKNISVNEPCFTGHFPGEPILPGVLILEALAQAMGILAFKTHELKGGELFYFAGIDEARFKRPVLPGDQMELNVQVIKKRRGITAFTGVATVNGEIACEAKLMCARR

SEQ ID NO: 11175 - protein, 545 aa, Haemophilus influenzae
MATNYIFVTGGVVSSLGKGIAAASLAAILEARGLNVTIMKLDPYINVDPGTMSPTQHGEVFVTQDGAETDLDLGHYERFIRTKMTKRNNFTTGKIYSEVLRKERRGDYLGATIQVIPHITNEIKDRVIAGAQGHDVVIVEVGGTVGDIESLPFLEALRQLAVQVGREHTLFMHLTLVPYIPTAGEVKTKPTQHSVKELLSIGIQPDVLICRSDRMIPPNERAKIALFCNVAERAVISLKDVNSIYQIPALLKSQGLDDFVCERFRLTCPEADLTEWEQVLYKQANPVGEVTIGMVGKYTELPDAYKSVNEALKHAGLTNRLSVNIKYIDSQDVETKGVEVLKGIDGILVPGGFGYRGVEGKIRTAQYARENKIPYLGICLGMQIALIEYARNVAGLTKANSSEFDKDCEQPVVALITEWQDAEGNTEVRTDESDLGGTMRLGAQQCHLVSGSRARELYGKETIEERHRHRYEVNNTLLPQIEKAGLKVTGLSADKKLVEIIEVPNHPWFVACQFHPEFTSTPRDGHPLFAGFVKAAYENHKKSVK

SEQ ID NO: 11176 - protein, 257 aa, Haemophilus influenzae
MKKLLFTTALLTGAIAFSTFSHAGEIADRVEKTKTLLVGTEGTYAPFTFHDKSGKLTGFDVEVIRKVAEKLGLKVEFKETQWDAMYAGLNAKRFDVIANQTNPSPERLKKYSFTTPYNYSGGVIVTKSSDNSIKSFEDLKGRKSAQSATSNWGKDAKAAGAQILVVDGLAQSLELIKQGRAEATINDKLAVLDYFKQHPNSGLKIAYDRGDKTPTAFAFLQGEDALITKFNQVLEALRQDGTLKQISIEWFGYDITQ

SEQ ID NO: 11177 - protein, 424 aa, Haemophilus influenzae
MDKFRVYGQSRLSGSVNISGAKNAALPILFAAILATEPVKLTNVPELKDIETTLKILRQLGVVVDRDATGAVLLDASNINHFTAPYELVKTMRASIWALAPLVARFHQGQVSLPGGCSIGARPVDLHISGLEKLGADIVLEEGYVKAQVSDRLVGTRIVIEKVSVGATLSIMMAATLAKGTTVIENAAREPEIVDTADFLNKMGAKITGAGSAHITIEGVERLTGCEHSVVPDRIETGTFLIAAAISGGCVVCQNTKADTLDAVIDKLREAGAQVDVTENSITLDMLGNRPKAVNIRTAPHPGFPTDMQAQFTLLNMVAEGTSIITETIFENRFMHIPELIRMGGKAEIEGNTAVCHGVEQLSGTEVIATDLRASISLVLAGCIATGETIVDRIYHIDRGYEHIEDKLRGLGAKIERFSGSDEA

SEQ ID NO: 11178 - protein, 679 aa, Haemophilus influenzae
MRSFFSENFMTNIQTQLDNLRKTLRQYEYEYHVLDNPSVPDSEYDRLFHQLKALELEHPEFLTSDSPTQRVGAKPLSGFSQIRHEIPMLSLDNAFSDAEFNAFVKRIEDRLILLPKPLTFCCEPKLDGLAVSILYVNGELTQAATRGDGTTGEDITANIRTIRNVPLQLLTDNPPARLEVRGEVFMPHAGFERLNKYALEHNEKTFANPRNAAAGSLRQLDPNITSKRPLVLNAYGIGIAEGVDLPTTHYARLQWLKSIGIPVNPEIRLCNGADEVLGFYRDIQNKRSSLGYDIDGTVLKINDIALQNELGFISKAPRWAIAYKFPAQEELTLLNDVEFQVGRTGAITPVAKLEPVFVAGVTVSNATLHNGDEIERLNIAIGDTVVIRRAGDVIPQIIGVLHERRPDNAKPIIFPTNCPVCDSQIIRIEGEAVARCTGGLFCAAQRKEALKHFVSRKAMDIDGVGGKLIEQLVDRELIHTPADLFKLDLTTLTRLERMGAKSAENALNSLENAKSTTLARFIFALGIREVGEATALNLANHFKTLDALKDANLEELQQVPDVGEVVANRIFIFWREAHNVAVVEDLIAQGVHWETVEVKEASENLFKDKTVVLTGTLTQMGRNEAKALLQQLGAKVSGSVSSKTDFVIAGDAAGSKLAKAQELNITVLTEEEFLAQITR

SEQ ID NO: 11179 - protein, 316 aa, Haemophilus influenzae
MAIYADNSYSIGNTPLVRLKHFGHNGNVVVKIEGRNPSYSVKCRIGANMVWQAEKDGTLTKGKEIVDATSGNTGIALAYVAAARGYKITLTMPETMSLERKRLLCGLGVNLVLTEGAKGMKGAIAKAEEIVASDPSRYVMLKQFENPANPQIHRETTGPEIWKDTDGKVDVVVAGVGTGGSITGISRAIKLDFGKQITSVAVEPVESPVISQTLAGEEVKPGPHKIQGIGAGFIPKNLDLSIIDRVETVDSDTALATARRLMAEEGILAGISSGAAVAAADRLAKLPEFADKLIVVILPSASERYLSTALFEGIEG

SEQ ID NO: 11180 - protein, 407 aa, Haemophilus influenzae
MTNKVNSYGWKALIGSAVGYGMDGFDLLILGFMLSAISADLNLTPAQGGSLVTWTLIGAVFGGILFGALSDKYGRVRVLTWTILLFAVFTGLCAIAQGYWDLLIYRTIAGIGLGGEFGIGMALAAEAWPARHRAKAASYVALGWQVGVLGAALLTPLLLPHIGWRGMFLVGIFPAFVAWFLRSHLHEPEIFTQKQTALSTQSSFTDKLRSFQLLIKDKATSKISLGIVVLTSVQNFGYYGIMIWLPNFLSKQLGFSLTKSGLWTAVTVCGMMAGIWIFGQLADRIGRKPSFLLFQLGAVISIVVYSQLTDPDIMLLAGAFLGMFVNGMLGGYGALMAEAYPTEARATAQNVLFNIGRAVGGFGPVVVGSVVLAYSFQTAIALLAIIYVIDMLATIFLIPELKGKALD

SEQ ID NO: 11181 - protein, 323 aa, Haemophilus influenzae
MNPLLDVKNLYVRFKTPDGVVTAVNDLNFTLNAGSTLGIVGESGSGKSQTAFALMGLLAANGEVEGSAIFEGKELVNLPNAELNKIRAEQISMIFQDPMTSLNPYMKIGEQLMEVLQLHKGYDKQTAFAESVKMLDAVKMPEAKKRMGMYPHEFSGGMRQRVMIAMALLCRPKLLIADEPTTALDVTVQAQIMTLLNELKREFNTAIIMITHDLGVVAGICDQVMVMYAGRTMEYGTAEQIFYHPTHPYSIGLMDAIPRLDGNEEHLVTIPGNPPNLLHLPKGCPFSPRCQFATEQCQIAPKLTTFNHGQLRNCWLSAEKFNL

SEQ ID NO: 11182 - protein, 321 aa, Haemophilus influenzae
MNSENSFSSSEHITVLLHEAVNGLALKENGIYIDGTFGRGGHSRFILSQLSSNGRLIAVDRDPRAIAEAHKIQDLRFQIEHNSFSHIPEICDKLNLVGKIDGILLDLGVSSPQLDEAERGFSFMKDGPLDMRMDTTQGLSAEEWLKQVSIEDLTWVLKTFGEERFAKRIATAIVDFNKSAVKNGTEFLSRTSQLAELISQAVPFKDKHKHPATRSFQAIRIFINSELDELESLLNSALDMLAPEGRLSIISFHSLEDRMVKHFMKKQSKGEDIPKGLPLREDQIQRNQKLRIIGKAIQPSDAEIQANPRSRSAILRVAERI

SEQ ID NO: 11183 - protein, 610 aa, Haemophilus influenzae
MVKFNSSRKSGKSKKTIRKLTAPETVKQNKPQKVFEKCFMRGRYMLSTVLILLGLCALVARAAYVQSINADTLSNEADKRSLRKDEVLSVRGSILDRNGQLLSVSVPMSAIVADPKTMLKENSLADKERIAALAEELGMTENDLVKKIEKNSKSGYLYLARQVELSKANYIRRLKIKGIILETEHRRFYPRVEEAAHVVGYTDIDGNGIEGIEKSFNSLLVGKDGSRTVRKDKRGNIVAHISDEKKYDAQDVTLSIDEKLQSMVYREIKKAVSENNAESGTAVLVDVRTGEVLAMATAPSYNPNNRVGVKSELMRNRAITDTFEPGSTVKPFVVLTALQRGVVKRDEIIDTTSFKLSGKEIVDVAPRAQQTLDEILMNSSNRGVSRLALRMPPSALMETYQNAGLSKPTDLGLIGEQVGILNANRKRWADIERATVAYGYGITATPLQIARAYATLGSFGVYRPLSITKVDPPVIGKRVFSEKITKDIVGILEKVAIKNKRAMVEGYRVGVKTGTARKIENGHYVNKYVAFTAGIAPISDPRYALVVLINDPKAGEYYGGAVSAPVFSNIMGYALRANAIPQDAEAAENTTTKSAKRIVYIGEHKNQKVN

SEQ ID NO: 11184 - protein, 488 aa, Haemophilus influenzae
MKKLTALFNLPELKNDIELHNMVLDSRKVKAGDLFVAIKGHQVDGNQFIDSALHSGASAVVSETELSSEHLTVAFIGNVPVVKYYQLAHHLSSLADVFYDSPSNNLTLVGVTGTNGKTTISQLLAQWAELLGHRAAVMGTIGNGLFGQIVEAKNTTGSAVEIQSSLSAFKHAGADFTSIEVSSHGLAQHRVEALHFKAAIFTNLTRDHLDYHQSMENYAAAKKRLFTELDTQIKVINADDEIGYQWLTELPDAIAVSMNADFKVGSHQWMKAINIHYHFKGADITFESSWGNGVLHSPLIGAFNVSNLLLVMTTLLSFGYPLENLLATAKSLKGVCGRMEMIQYPNKPTVIVDYAHTPDALEKALIAAREHCQGELWCIFGCGGDRDRGKRPLMAQVAEQFAEKIIVTKDNPRTESQSQIETDIVAGFKNMEKVGIIPDRAQAIQFAIESAVENDVILIAGKGHEHYQIIGSEVVHFSDQEIALDFLK

SEQ ID NO: 11185 - protein, 457 aa, Haemophilus influenzae
MIKLSTVQLAQILQAKLIGDENVQVEKINTDTRKSVSNSLFFALKGEKFDAHQYLDQAVSQGALALVVQQENSSISVPQLVVKDTRIALGELAKWLREKINPRTVAMTGSSGKTTVKEMTASILQHTAADSEAVLFTNGNFNNDIGVPLTLLRLTEKHRFAVIELGANHQNEINYTTKLVQPNAALINNIAPAHLEGFGSLAGVVQAKGEIYRGLTKNGVAIINAEHNHLDIWQKEISNHAIQYFNGKDYSAKNIHHTSQGSTFTLISPQGEIEITLPYLGEHNVKNALAATALAMNVGATLTDVKAGLEQRSQVKGRLFPIQVTPNLLLLDDTYNANKDSLCAAIDVLKGYDAFRILCVGDMKELGENSLAIHREVGQYINLVNLDLVCSYGNESAVISEAVSGKHFTDKTEMVDFLVPLIENQLQQNKKVVVLGKGSRSMKMEDVIYSLKDKIKC

SEQ ID NO: 11186 - protein, 360 aa, Haemophilus influenzae
MLVWLAEYLVRYETAFNAISYITVRANLALLTALFISLWIGPKVIKRLQILKFGQEVRNDGPESHFAKKGTPTMGGVMILFSIGVSTLLWANLANPYIWVCLFVLFGYGAIGFVDDFRKITRKNTDGLIARWKYFWMSVVALVAILWLYWLGHDTDATRLVIPFFKDIMPQLGLFYIVLSYFVIVGTGNAVNLTDGLDGLAIMPTALVAGAFALIAWATGNVNFAEYLHIPYIKYSSEVVVFCTAIVGASLGFLWFNTYPAQVFMGDVGSLALGGALGVVAILVRQEFLLVIMGGVFVVEALSVILQVGSYKLRKQRIFRMAPIHHHFELKGWPEPRVIIRFWIISLMLVLMGLVTLKLR

SEQ ID NO: 11187 - protein, 437 aa, Haemophilus influenzae
MNAYQNKNITIIGLGKTGLSCVDYLLSQQANIRVIDTRKNPTGIDKLPQNIPLHTGSLNQEWLLESDMIVISPGLAVKTPEIQTALKAGVEVIGDIELFCRAATKPIVGITGSNGKSTVTTLVYEMAKAAGVKVGMGGNIGIPALSLLNEDCELYVLELSSFQLETTYSLKAAAATVLNVTEDHMDRYMDLEDYRQAKLRIYHNAKVGVLNNEDRLTFGENENQAKHTVSFAENSADYWLKTENGKQYLMVKDEVILPCEEATLVGRHNYMNILAATALAQAIGINLDSIRTALRHFKGLDHRFQLVHQANGIRWINDSKATNVGSTVAALAGLYIEGKLHLLLGGDGKGADFSELAELINQPHIICYCFGRDGALLAKFSSQSYLFDTMEQAIEFLRPTLQSGDMVLLSPACASLDQFASFEKRGEEFTHLAQCLT

SEQ ID NO: 11188 - protein, 394 aa, Haemophilus influenzae
MEFLQNIKKNYDEWTRITPQGLLYDRALFWLFVILLLIGLVAVTSASIPYSSRLFNDPFYFAKRDAIYVLLSLLTCYISLQISSSQWEKWHAKIFLFSVILLLLVPFIGTSVNGAKRWISLGILNFQPAEFAKLALTCFLASYFTRRYDEVRSRHVSIFKPFIVMLVLGCFLLLQPDLGSTVVLFIIMSGMLFIVGAKILQFVGLIALGGILFVWLVLTASYRLKRFIGFLEPFKEPYGTGFQLTNSLIAFGRGEITGEGLGNSIQKLDYLPEAHTDFIMAIIGEEFGFIGILIVILLLGLLIFRAMKIGRESLMLEQRFRGFFALGIGFWIFFQGFVNLGMALGMLPTKGLTFPLVSYGGSSIIIMSATIGILLRIDHENRLFRIGQARLRDD

SEQ ID NO: 11189 - protein, 351 aa, Haemophilus influenzae
MKNKKLLVMAGGTGGHVFPAIAVAQTLQKQEWDICWLGTKDRMEAQLVPKYGIPIRFIQISGLRGKGIKALLNAPFAIFRAVLQAKKIIQEEKPDAVLGMGGYVSGPAGVAAKLCGVPIILHEQNAIAGLTNKLLGKIATCVLQAFPTAFPHAEVVGNPVREDLFEMPNPDIRFSDREEKLRVLVVGGSQGARVLNHTLPKVVAQLADKLEFRHQVGKGAVEEVSQLYGENLEQVKITEFIDNMAEAYAWADVVICRSGALTVCEIAAVGAAAIFVPFQHKDRQQYLNAKYLSDVGAAKIIEQADLTPEILVNYLKNLTRENLLQMALKAKTMSMPNAAQRVAEVIKQYSN

SEQ ID NO: 11190 - protein, 475 aa, Haemophilus influenzae
MKHSHEEIRKIIPEMRRVQQIHFIGIGGAGMSGIAEILLNEGYQISGSDIADGVVTQRLAQAGAKIYIGHAEEHIEGASVVVVSSAIKDDNPELVTSKQKRIPVIQRAQMLAEIMRFRHGIAVAGTHGKTTTTAMISMIYTQAKLDPTFVNGGLVKSAGKNAHLGASRYLIAEADESDASFLHLQPMVSVVTNMEPDHMDTYEGDFEKMKATYVKFLHNLPFYGLAVMCADDPVLMELVPKVGRQVITYGFSEQADYRIEDYEQTGFQGHYTVICPNNERINVLLNVPGKHNALNATAALAVAKEEGIANEAILEALADFQGAGRRFDQLGEFIRPNGKVRLVDDYGHHPTEVGVTIKAAREGWGDKRIVMIFQPHRYSRTRDLFDDFVQVLSQVDALIMLDVYAAGEAPIVGADSKSLCRSIRNLGKVDPILVSDTSQLGDVLDQIIQDGDLILAQGAGSVSKISRGLAESWKN

SEQ ID NO: 11191 - protein, 306 aa, Haemophilus influenzae
MNLKQEKIAVLLGGTSAEREVSLNSGKAVLEALLKQGYNAHPIDPKEYNVANLKKDGFNRAFNILHGRGGEDGTMQGLLEQIGLPYTGCGVMASALTMDKMRTKMLWKAFGLPVADMKVVTRETFSELDPQAVVAKLGLPLMVKPSLEGSSVGLTKVKAVEELKSAVEYALKFDNTILIEEWLAGDELTVPVLDNQVLPAIRIVPEGEFYDYEAKYISDNTQYFCPAGLTPEREQALSTLVKRAYDAVGCRGWSRIDVMCDAKGNFRLVEVNTNPGMTSHSLFPKSAATVGISFEQLVVKILELSL

SEQ ID NO: 11192 - protein, 421 aa, Haemophilus influenzae
MLYPEYPEYDNFNESGALIKVVGVGGGGGNAVNHMVMNMVKQEMGGTFVGESSLTSEEHGRIVFYAVNTDAQALRKSQVQQTVQIGGETTKGLGAGANPNIGRKAAEDDQDEIRKMLEGADMVFIAAGMGGGTGTGAAPVVAKIAKELGILTVAVVTKPFTFEGKKRMQFAELGIKDLSQYVDSMIIIPNQQIQKVLPKNAKLIDAFAAANDVLRNSVMGISDMITSPGLINVDFADVRTVMSVQGQAMIGFGSAVGEPGAGRAEEAARLAVRNDLLEKIDLSNAQGILVNITAGMDLVFEEFNIIGETIGSFASEEATVVVGTSLVPEMSDEIRVTIVATGLGEIAGNEPIQVVRQGLSTQNIEGEGRVNIVPELHRRESVEVSRTASEEYQRPLDKPITDRLEAFKKNNFFNPAQREEN

SEQ ID NO: 11193 - protein, 289 aa, Haemophilus influenzae
MGKLMEIIIISGRSGAGKSVALRALEDAGYYCVDNIPLDLLPQLTDILSQSQSSVAISLDIRNIPNSAHSLKQTLSTLQKHHQIKIIFLEADRATLIRRYSDSRRLHPLSLKDLSLEAAIDEEYRYLEPLIQHANLILDTTHLSTHSLAERLREFLRGNSEKELKIIVESFGFKYGIPLDADYVFDVRFLPNPHWDPTLRPMTGLEAPVAEFLNSHTEVNEFIYLTRHYIDTWLPMLEKNNRSYLTIAIGCTGGKHRSVYIAQQLGEYFQAKGKTVKIQHKSLERNKKI

SEQ ID NO: 11194 - protein, 241 aa, Haemophilus influenzae
MSILTAENLAKSYKSRKVVSDVSLTVNSNEIVGLLGPNGAGKTTTFYMVVGLVRQDQGKIVIDGEDISLLPMHNRAQRGIGYLPQEASIFRRLTVYENLMAVLEIRKDLTPQQRREKADELIEEFNISHIRDNLGQALSGGERRRVEIARALAANPKFILLDEPFAGVDPISVSDIKKIITDLRNRGLGVLITDHNVRETLDVCERAYIVGAGKIIATGTPEQVMNDEQVKRVYLGEQFKL

SEQ ID NO: 11195 - protein, 178 aa, Haemophilus influenzae
MAKRKKKEVFDWEDEDQEEIIWVSKSEIKRDAEDLKQLGEKIVNLTKANLAKIPLDESLLDAIELAQRLQKEARRRQLQYIGKLFRGIDVEPIREALDKIENKHNQQQAMLHKIEKVRDELVEKGDVALTDLLNDYPNGDRQQLRNLIRSAQKELEQNKPSKAYREIYQMLKVLMLED

SEQ ID NO: 11196 - protein, 384 aa, Haemophilus influenzae
MSSYLFTSESVSEGHPDKIADQISDAVLDEILKQDPKARVACETYVKTGMALVGGEITTSAWVDIENLTRKVICDIGYEHSEMGFDGHSCAVLNAIGKQSADINQGVDRENPLDQGAGDQGIMFGYATNETDVLMPAAITYAHRLMEKQSEVRKSGKLAWLRPDAKSQVTLKYEDNKIVGVDAVVLSTQHSEEVSQKDLHEGVMEEIIKPVLPSEWLSKETKFFINPTGRFVIGGPMGDCGLTGRKIIVDTYGGAARHGGGAFSGKEPSKVDRSAAYAARYVAKNIVAAGLADRCEIQLSYAIGVAEPTSIMVETFGTGKVANELLVSLVREFFDLRPYGLIKMLDLIQPIYRETAAYGHFGREQFPWEKVDRAEDLRIAAGLK

SEQ ID NO: 11197 - protein, 227 aa, Haemophilus influenzae
MFQEYLSVIVKGIPTSLLLTVVSLLIAFFLALFLTFLLSMENKWIKSAVNLYLTLFTGTPLLVQFFLIYAGPGQFQWIIDSPLWYVLSNAWFCAALALALNSAAYSTQLFHGAVKAIPKGQWESCGALGLNRIQTLKILIPYALKRALPSYSNEIILVFKGTALASTITIMDIMGYARQLYGTEYDALTIYGIAGGIYLIITGIATLLLRKLEKKVLAFERFEVSKA

SEQ ID NO: 11198 - protein, 327 aa, Haemophilus influenzae
MTNEVKENTPLLNAIGLKKYYPVKKGLFAKPQQVKALDGVSFQLERGKTLAVVGESGCGKSTLGRLLTMIEEPTKGELYYKGHNFLENDSETKALRRKKIQIVFQNPYASLNPRKKIGSILEEPLIINTKLSAKERREKVLSMMEKVGLRAEFYDRYPHMFSGGQRQRIAIARGLMLDPDVVVADEPVSALDVSVRAQVLNLMMDLQDELGLSYVFISHDLSVVEHIADEVMVMYLGRCIEKGTTEQIFSNPQHPYTKALLSATPRLSPNLRRERIKLTGELPSPINPPKGCAFNPRCWKATEKCRENQPHLEQHTDGKLIACFHID

SEQ ID NO: 11199 - protein, 727 aa, Haemophilus influenzae
MMDISELLDGLNDKQRERVAAPLGNHLVLAGAGSGKTRVLTHRIAWLIAVENISEGSIMAVTFTNKAAAEMRHRIQSTLAKHAQHQLFGMWIGTFHSIAHRLLRAHHLDVGLPQDFQILDSEDQLRLIKRLLKLHNFDEKAFPPKQACWYINNKKDEGLRPNDIEDFNDRQEREWIKIYQIYQDTCDRAGLVDFAELLIRVYELFEKKPLILQRYQQRFQHILVDEFQDTNKIQYKWIKILAGKTGQVMIVGDDDQSIYGWRGAQIENIQKFLKDFKAETIRLEQNYRSTANILNSANELIANNSDRLGKNLWTEGEKGDPVGIYSAFNELDEAKFVASQIQDWVEHGGKLDDCAVLYRSNSQSRVIEEALIRCQIPYRIYGGMRFFERQEIKDALAYLRLINNRQDDAAFERVINTPTRGIGDRTLDILRNLTRERQITLWQAVQVATQENMLAGRASTALLRFQELINSLQLDTAEMPLFAQTDFVIKHSGLYEMYQQEKGEKGEVRIENLEELVTATREFIKPDNAEEMTELTAFLTHASLEAGEEQASPHQSCVEMMTLHSAKGLEFPRVFMVGVEEGLFPSFRSFEEPGRLEEERRLAYVGITRAKKKLTISYAESRRLYAKEERHLPSRFIAELPRECIQEIRLRGTVTRAMNLAKVGSLSNTSAVENEWKMGQKVKHEKFGFGTVINVEGSENNTRLQIAFQAQGIKWLIAHLAKLEKVR

SEQ ID NO: 11200 - protein, 301 aa, Haemophilus influenzae
  VARIANT (1)...(301): Xaa = Any Amino Acid
MEILMYKRLPPLNSLKSFESAARYLSFTKAADELCVTQAAVSHQIKLLEXFLGIDLFKRKNRSLELTELGKAYFVDINKILRRLNEATERLLTLKTDPHLNISVPQTFGIQWLVPHLSEFNQLYPQIEVRLTGVDQDEGLLNKEIDLAIYYGLGNWQNLQVDRLCEENLLILASPELLAENPIIQPEDLKKHTLIHIHTCDNWQAMANHLQLDDLNIQQGPLFSHTFMALQAAIHGQGIVLANRLLALQEIENGSLQAVLPTNLPDPKSFYVVNHLDRLDDQKIQAFRQWIINSIKQEENE

SEQ ID NO: 11201 - protein, 293 aa, Haemophilus influenzae
MAILIDKNTKVICQGFTGGQGTFHSEQALAYGTQLVGGVSPNKGGTTHLGLPVFNTVREAVENTGVTATVIYVPASFCKDAIIEAIDAGIQLIVCITEGIPTLDMLKVKQKLNETGVVMIGPNCPGVITPDECKIGIMPAHIHKKGKVGIVSRSGTLTYEAVKQTTDEGFGQSTCVGIGGDPIPGSSFIDILERFQQDPETEAIVMIGEIGGSAEEEAAIFIKDNVTKPVVAYIAGITAPKGKRMGHAGAIISGGKGTAVEKIAALEAAGVTCVKSLAEIGEALRKLLKSSKN

SEQ ID NO: 11202 - protein, 357 aa, Haemophilus influenzae
MKPSQKQTQRQPHFSKDSAKKRDFSAKNDRRSVSRTARIETANTKKSAVNSDNKFLSKPKAKPVVRASNQPKAEGEKLQKVLARAGQGSRREIETMIAAGRVSVEGKIATLGDRIDVHSGVKVRIDGQIINLSHTQKEICRVLMYYKPEGELCTRSDPEGRATVFDRLPRLTGSRWIAVGRLDINTSGLLLFTTDGELANRLMHPSREVEREYSVRVFGQVDDAMLARLRKGVQLEDGLANFKEIKFTGGVGINQWYDVTLMEGRNREVRRLWESQGIQVSRLIRIRYGNIKLMKGLPRGGWEEMDLENVNYLRELVGLPAETETKLDVKQASRRPKSGQIRKAVKRYSEMNKRYKK

SEQ ID NO: 11203 - protein, 711 aa, Haemophilus influenzae
MSRTIILIPVSTGVGLTSISLGLIHSLEQKGTKVAFMKPVSQPSTGEDKLDRTTSIIRTSTSLETAEPFMLSVAESLIGQNQSDVLLEKIVANHQQLTKNNDIVVVEGLIPTRKHGYANSINYEIAQALDAEIVLVAAPATETPTELKDRVEAAASLFGGKNNPNLLGVVVNKFNAPVDESGRTRPDLAEIFDSFQHNHISETEVNKLFAGSAIKLLACVPWNANLIATRAIDLVKHLGASIINEGEINRRIRGITFCARSLPNMVEHFRAGSLLVASADRPDVLVAAALAASNGIEIGGILLTGGYKIDAQINKLCRPTFEKAKLPIFRIEGNTWQTALSLQSFNLEVPVDDKERIENIKQYISQHFNADFINNLVADSSRLPRLSPPAFRFQLTELARAAKKRIVLPEGDEPRTIKAAVLCAERGIAECVLLADPASVQRVAEAQGVKLGKGITIINPADVRENYVDRLVELRKAKGMTETAAREQLEDTVVLGTMMLEANEVDGLVSGAVHTTANTIRPPMQIIKTAPGSSIVSSIFFMLLPDQVLVYGDCAVNPDPTAEQLAEIAIQSADSAKAFGIDPKVAMISYSTGTSGSGADVEKVKEATRIAKEKRPDLLIDGPLQYDAAVMEDVARSKAPNSPVAGKATVFVFPDLNTGNTTYKAVQRSADLVSIGPMLQGMRKPVNDLSRGALVDDIVYTIALTAIQATQ

SEQ ID NO: 11204 - protein, 296 aa, Haemophilus influenzae
MNILLTGGTGLIGKALVERLCLRNEQVTILTRSSSPHTLSKHKNIKFITALSQLNSQEQFDAIINLAGEPIFHKVWSKNQKSILRESRLSLTTQLVEFINQYQQHPIFISGSATGIYGDQDEQKITETSKTAKTFTAQLCQDWENIAQQANGRVCLIRTGMVFSTKGGALAKILPFYKWGLGGKLGKGEQYFPWIALEDMVNGILFLLDHSECRGAFNFAAPKSIKQHKFNRTLAQLLKRPAFATIPKWLLHFILGERANLLLESQNVVPEKLLNAGFQFQYADCENYLEDILKNK

SEQ ID NO: 11205 - protein, 502 aa, Haemophilus influenzae
MSEQEVKELDLNGEMLVRREKLAALRAKGNAFPNKFRRDALAQDLHNQYDAEDGEILKEKGIEVQVAGRIMTRRAMGKATFITIQDMSGKIQLYVARDNLPEGVYKDDVGTWDLGDIVGIKGTLFKTKTDELTVKTTEVQLLTKALRPLPDKFHGLTDQEVRYRQRYLDLISNEESRRTFIIRSKVVAGIREYFISKGFMEVETPMLQVIPGGASARPFVTHHNALDVDMYLRIAPELYLKRLVVGGFERVFELNRNFRNEGVSVRHNPEFTMLEYYQAYADYHDLMDNTEELLRKLAIDILGTTIVKYGDLEFDFGKPFERITLHDATIKYGADKGIVKEDLYDFDRAKATAERLGIEVQKSWGLGSIVNAIFEEVAEHHLIQPTFLNGSPAEISPLARRNDENPEVTDRFELFIGGREIGNGFSELNDAEDQNERFDAQVAAKEAGDDEAMFKDEDFVVALEHGLPPTAGEGLGIDRLAMLYANAPSIRDVILFPAMRQK

SEQ ID NO: 11206 - protein, 549 aa, Haemophilus influenzae
  VARIANT (1)...(549): Xaa = Any Amino Acid
MSESFAQLFEESLKVLETRQGSIVSGTVVAIQKGFVLVDAGLKSESAIPVAEFLNAQGELEIQVGDTVNVALDAVEDGFGETKLSREKAVRHESWIELEKAYEEKATVIGLIXGKVKGGFTVELNGVRAFLPGSLVDTRPAREADHLLGKELEFKVIKLDQKRNNVVVSRRAVIESENSQEREQVLENLVEGSEVKGVVKNLTEYGAFVDLGGVDGLLHITDMAWKRVKHPSEIVNVGDEVTVKVLKFDKDRTRVSLGLKQLGQDPWAAIAENHPVNSKLTGKVTNLTDYGCFVEILDGVEGLVHVSEMDWTNKNIHPSKVVSLGDTVEVMVLEIDEERRRISLGLKQCKANPWTQFADTHNKGDKVTGKIKSITDFGIFIGLEGGIDGLVHLSDISWSISGEEAVRQYKKGDEVSAVVLAVDAVKERISLGIKQLEEDPFNNFVAINKKGAVVSATVVEADAKGAKVELAGGVEGYIRSADLTSEVAVGDVVEAKYTGVDRKSRIVHLSVKAKDQAEEAAAVASVNNKQEDIVIPNAMAEAFKAAKGE

SEQ ID NO: 11207 - protein, 208 aa, Haemophilus influenzae
MKLVEVKHPLVKHKLGVMREAEIDTKKFRELATEIGSLLTYEATSDLETEKVTINGWNGPVEIDRIKGKKVTVVPILRAGLGMMDGVLEHVPSARISVVGIYRNEETLEPVPYFQKLASDLEERLSIVVDPMLATGGSMIATLDLLKAKGCKHIKVLVLVAAPEGIKALEAAHPDIELYCASIDSHLNEQGYIIPGLGDAGDKIFGTK

SEQ ID NO: 11208 - protein, 478 aa, Haemophilus influenzae
MSKEIKTQVVVLGAGPAGYSAAFRCADLGLETVIVERYSTLGGVCLNVGCIPSKALLHVAKVIEEAKHANKNGIYFSEPRIELDEVRAGKEAVVAKLTGGLAGMAKARKVTVVEGLATFTDSHTLVARDRDGNPTTVKFDNAIIAAGSRPVQLPFIPHEDPRIWDSTDALKLKEVPKKLLIMGGGIIGLEMGTVYNALGSEVEVVEMFDQVIPAADKDVVGIYTKQVEKKFKLMLETKVTAVEAKDDGIYVSMEGKACNDTKRYDAVLVAIGRVPNGKLIDAGKAGVEVDDRGFIHVDKQMRTNVPHIYAIGDIVGQPMLAHKGVHEGHVAAEVIAGQKHYFDPKVIPSIAYTEPEVAWVGKTEKECKQEGLNYEVAKFPWAASGRAIASECSEGMTKLIFDKDTHRVLGGAIVGSNGGELLGEIGLAIEMGCDAEDIALTIHAHPTLHESVGLAAEVFEGSITDLPNAKAKEKIISI

SEQ ID NO: 11209 - protein, 635 aa, Haemophilus influenzae
MGKIIGIDLGTTNSCVAVMDGDKARVIENAEGARTTPSIIAYTDNETLVGQPAKRQAITNPKNTLFAIKRLIGRRFESEEVQRDIKIMPFEITRADNGDAWVNVKGDKLAPPQISAEVLKKMKKTAEDFLGESVTEAVITVPAYFNDAQRQATIDAGKIAGLDVKRIINEPTAAALAFGLGSSKENQVIAVYDLGGGTFDISIIEIDNFDGEQTFEVLATGGNTHLGGEDFDNRVIDYIIDEFKKEQNIDLRNDAMALQRVKEAAEKAKIELSSAQSTEVNLPYITADATGPKHLALNITRAKLEALVEDLVASSIESLKAVLKDADKGVSEIHDIILVGGQTRMPLVQQKVAEFFGKEARKDVNPDEAVAIGAAVQGGVLKGDVKDVLLLDVTPLSLGIETMGGVMTTLIEKNTTIPTKKSQVFSTAEDNQSAVTIHVLQGERKRAADNKSLGQFNLEGINPAPRGMPQIEVTFDIDANGVINVSAKDKNTGKEQQIRIQASSGLSDEEIQQMVRDAEANADADRKFEEVVQARNQADGIAHATRKQIAEAGDALSVADKEKIEAAVAELETAAKGEDKAEIEAKIEAVIKASEPLMQAVQAKAQQAGGEQPQQSSAKDDGVVDAEFEEVKDNK

SEQ ID NO: 11210 - protein, 232 aa, Haemophilus influenzae
MRLDKFIAENVGLTRSQATKAIRQSAVKINGEIVKSGSVQISQEDEIYFEDELLTWIEEGQYFMLNKPQGCVCSNDDGDYPTIYQFFDYPLAGKLHSAGRLDVDTTGLVLLTDDGQWSHRITSPKHHCEKTYLVTLADPVEENYSAACAEGILLRGEKEPTKPAKLEILDDYNVNLTISEGRYHQVKRMFAALGNKVVGLHRWKIGDVVLDESLEEGEYRPLTQSEIEKLVK

SEQ ID NO: 11211 - protein, 1146 aa, Haemophilus influenzae
MKTAFFQPDIPTQPNDHKILGNVLPGADALAISEISEQNQNLTVVVTPDTRSAVRLSRVLSELSSQDVCLFPDWETLPYDTFSPHQEIISSRLSALFHLQNAKKGIFLLPISTLMQRLCPPQYLQHNVLLIKKGDRLVIDKMRLQLEAAGYRAVEQVLEHGEYAVRGALLDLFPMGSAVPFRLDFFDDEIDSIRTFDVDTQRTLDEISSINLLPAHEFPTDDKGIEFFRAQFRETFGEIRRDPEHIYQQISKGTLISGIEYWQPLFFAEMATLFDYLPEQTLFVDMENNQTQGERFYQDAKQRYEQRKVDPMRPLLSPEKLWLNVDEVNRRLKSYPRITFKAEKVRSSVRQKNLPVAALPEVTIQSQQKEPLGQLRQFIEHFKGNVLFSVETEGRRETLLDLLSPLKLKPKQIQSLEQIENEKFSLLVSSLEQGFIIEQSLPVAIIGEANLLGKRIQQRSRDKRKTINPDTLVRNLAELKIGQPVVHLDHGVGRYGGLVTLDTGGIKAEYLLLNYANESKLYVPVTSLHLISRYVGGSDESAPLHKLGNEAWAKSRQKAAEKIRDVAAELLDVYAQREAKKGFAFKYDREEFQQFSATFPFEETYDQEMAINAVISDMCQPKAMDRLVCGDVGFGKTEVAMRAAFLAVMNHKQVAVLVPTTLLAQQHYENFKDRFANLPVNVEVLSRFKTAKEQKQILENLAEGKVDILIGTHKLIQSDVKFNDLGLLIIDEEHRFGVGQKEKIKQLRANIDILTLTATPIPRTLNMAMNGIRDLSIISTPPARRLSIKTFVRQNDDLVVREAILREILRGGQVYYLHNDVASIENTAEKLTALVPEARVIVGHGQMRERELERVMSDFYHQRYNVLVCSTIIETGIDVPTANTIIIERADHFGLAQLHQLRGRVGRSHHQAYAYLLTPPPKMMTKDAERRLDALENLDNLGAGFILATHDLEIRGAGELLGNEQSGQIESIGFSLYMELLDAAVKALKEGREPSLEELTQQQADIELRVPALLPDDYLGDVNMRLSFYKRIAAAESKAELDELKVELIDRFGLLPDATKNLLQITELRLLVEPLNVVRIDAGTQGGFIEFSAKAQVNPDKFIQLIQKEPIVYRFDGPFKFKFMKDLSDNKVRLEFVVDLLRTIAA

SEQ ID NO: 11212 - protein, 296 aa, Haemophilus influenzae
MSWINRIFSKSPSSSTRKANVPEGVWTKCTACEQVLYSEELKRNLYVCPKCGHHMRIDARERLLNLLDEDSSQEIAADLEPKDILKFKDLKKYKDRINAAQKETGEKDALITMTGTLYNMPIVVAASNFAFMGGSMGSVVGAKFVKAAEKAMEMNCPFVCFSASGGARMQEALFSLMQMAKTSAVLAQMREKGVPFISVLTDPTLGGVSASFAMLGDLNIAEPKALIGFAGPRVIEQTVREKLPEGFQRSEFLLEKGAIDMIVKRSEMRQTLASVLSKLTNQPSPFVEPELISEDE

SEQ ID NO: 11213 - protein, 880 aa, Haemophilus influenzae
MTDSIQSSITPVNIEEELKSSYLDYAMSVIVGRALPDVRDGLKPVHRRVLFSMDREGNTANKKYVKSARVVGDVIGKYHPHGDSAVYDTIVRMAQPFSLRYMLVDGQGNFGSIDGDAPAAMRYTEVRMQKITQALLTDLDKETVNFSPNYDGELMIPDVLPTRIPALLANGSSGIAVGMATNIPPHNLNEVLNGCLAYIDKNEITIDELMQHIPGPDFPTAALINGRKGIEEAYRTGRGKVYVRARATVETNEKGREQIIVSELPYQVNKAKLVEKIAELIREKKIEGISNITDLSNKEGIRIEIDIKRDAVGEVVLNHLYSLTQMQVTFGINMVALDHGQPRLFNLKEIIEAFVLHRREVVTRRSIFELRKARERTHILEGLAVARSNIDEMIAIIRNSKNREEAATSISSRSWTLHSDIINLLDASARPDELEENLGIQGEQYYLSPAQVNAILELRLHRLTGIAFEEVIKEYEELLVKIADLLHILSSAERLMEVIREELEEVKAQFGDDRLTEITAASGDIDLEDLIAQEDVVVTLSHEGYVKYQPLTDYEAQRRGGKGKSATKMKEEDFIEKLLVANTHDTILCFSSRGRLYWLKVYQLPQASRGARGRPIVNILPLQENERITAILPVSAYEEDKFVVMATAGGIVKKIALTEFSRPRSNGIIALNLRDEDELIGVDITDGSNEIMLFSSQGRVVRFAENAVRAMGRLATGVRGIKLALTNDISDDESAVEIEDISDDNAEASLDLNIDKVVSLVVPKGEGAILTATQNGYGKRTQLSEYPTKSRNTKGVISIKVSERNGKVVAATQVEETDQIMLITDAGTLVRTRVSEVSIVGRNTQGVRLIRTADDEHVVSLERVCDADEDDSLEESSSEE

SEQ ID NO: 11214 - protein, 682 aa, Haemophilus influenzae
MTTQPRKILVTCALPYANGAIHLGHMLEHIQADIWVRFQRMRGNKIHFVCADDAHGTPIMLNADKLGITPEELIAKAKADHIRDFAGFNISFDNYHSTHSEENKQLTAEIYNKLKANGFIKSKVISQLFDPEKNMFLPDRFVKGTCPKCKAEDQYGDNCEVCASTYSPMDLINPRSAVSGTTPIVKESEHFFFDLPAFEGMLKEWTRSGSLQSEIANKMQEWFESDLQQWDISRDAPYFGFEIPGAKDKFFYVWLDAPIGYMASFKNLCNREGIDFNEFWAEGSDAELYHFIGKDIVYFHSLFWPAMLEGSGYRKPTNVFAHGYVTVDGAKMSKSRGTFIQASTYLNHIDPECLRYYYAAKLNDRIEDLDFNLEDFVQRVNTDIVNKLVNLASRNAGFIAKRFEGKLADKLEDKSLFAEFTAQAEQIAAYYESREYNKTIREIMALTDKANKYIDEKAPWVIAKEEGKEAELQAVCSMGIELFRVLMSYLKPVLPKLAERAETFLQAELRWDNIHQPLLGHTLAPFKALFSRLEKKQIDAVVEETKALFAAANKAAEKTEAKPTALSAVEPIAETITIDDFAKLDMRVAKVLKCEAVPESNKLLRFELDLGDHTRQVFSGIKAAYNKPEELEGRFVIMVANLAPRKMKFGVSEGMILSAGTGGSDLFLLSADSGVTAGMQVK

SEQ ID NO: 11215 - protein, 495 aa, Haemophilus influenzae
MSKEILLAAEAVSNEKLLPREKIFEALESAIAISTKKKFEYETDIRVSINPKTGEFDTFRRWLVVDEVKVPTKEITLEAAQFDDPNLQLGEYVEDQIESIAFDRIAMQTARQVISTKIREAERAKVVEQFREEEGKIVTGTVKKVSRDSIILDLGNKAEAMIAREDMLPRENFRPGDRVRGVLYKVNPEGKTAQLFVTRSKPEMLIELFRIEVPEIGEEMIEIRGAARDAGSRAKIAVKSNDKRIDPVGACVGMRGARVQVITNELGGERVDIVLWDDNPAQFVINAMAPADVSSIIVDEDNHSMDIAVEADNLAQAIGRNGQNVRLATQLTGWTLNVMTTDELNAKHQAEDNKVLNLFINALELDEEFAQILVEEGFTSLEEIAYVPMNELTAIDGLEDEDLVEELQTRAKNAITAAAVAEEEALKKANVEDRLLNLEGMNRHVAIKLAEKQITTLEELAEQGVDDLTDIEELTAEQAADLIMAARNICWFGEE

SEQ ID NO: 11216 - protein, 829 aa, Haemophilus influenzae
MTEDVKADAPKKLSIQRRTKTTVSSTTTGGKSKEVQVEVRKKRTVKTDIAQQEEAKLKAQQEAEAKKIAEQKAAEEKARLEAEKAKAETAKPVKSAVDSKAKSVESEKEKRKAGEAELRRKAEELARQKAEEQARRAVEEAKRYAEADDSDNESSSEDYSDYNLSSRYALEAEDEEDRRNENRGRGKNKVAKAKKGGRDDENSKNSKNERESNRKNQKDAKFGKGKNGKKGAALQQAFTKPAQVVKSDVVIGETITVAELANKMAVKATEIIKMMMKMGEMVTINQVIDQETAQLVAEELGHKVILRNENELEEAVLGDRDVNAEKVTRAPVVTIMGHVDHGKTSLLDYIRKAKVAAGEAGGITQHIGAYHVEMDDGKMITFLDTPGHAAFTSMRARGAKATDIVVLVVAADDGVMPQTIEAIQHAKAAGAPLVVAVNKIDKPEANLDRVEQELLQHDVISEKFGGDVQFVPVSAKKGTGVDDLLDAILLQSEVLELTAVKDGMASGVVIESYLDKGRGPVATILVQSGTLRKGDIVLCGFEYGRVRAMRDENGKEVDEAGPSIPVELLGLSGVPAAGDEATVVRDEKKAREVALYRQGKFREVKLARQQKAKLENMFSNMSEGDVAELNVIVKADVQGSVEAIVQALNELSTNEVKVKVVGSGVGGITETDATLATASNAIIVGFNVRADATARRVIEAENIDLRYYSIIYELLNEIKAAMSGMLEPEFKQEIIGLAEVRDVFRHPKFGAIAGCMVTEGVVKRNNPIRVLRDNVVIFEGELESLRRFKDDVSEVRNGMECGIGVKNYNDVKVGDQIEVFEVVEVKRSI

SEQ ID NO: 11217 - protein, 1055 aa, Haemophilus influenzae
MLNENDIEQLTLQRLQSLGWEYRYGKDLPVHEGKFARGDLSGVVFVEQLREAVRKLNPQLPESAVDSVVKSATKSDIGDLVVRNQTFYKLLRDGVRVEYTQNGEQKIEMVRLVDFEHWGNNRFVAVNQLEIRSRKGGKRIPDIIGFVNGLPLVVFELKNPLRESADLLQAFNQFETYKDEIAELFVYNQALIISDGIVARLGSLSADFQRFTPWKVVDEKNKSARLYFDDELQSLLNGLMQPEDLLDYIRYFVLFERDSVGKTIKKIAAYHQYYGVNEAVDSTIWATSEKGDRRIGVMWHTQGSGKSISMLFYAGKLLAQPELKNPTIVVVTDRNDLDGQLFQTFSSGKDLIKQTPQQVEDRDQLRQLLAQNEVGGVFFTTIQKFALNEEESRFPILNERNNIIVISDEAHRSQYGFTQKLHNGKFQTGYARHLRDALPNASFIGFTGTPISLEDKDTQDVFGRYVSIYDLQDAVEDGATVPIVYDDARQIRLNKKDHDALFAEIDALLEEEPSTSLRLREKLLGSQERLIELAADFVQHFAKRNEVVDSKAMMVVSSRQICVDLYNQIIALHPEWHSDNINEGAIKIVMTGSASDTPEMQKHIYSKQEKQTLERRFKDPNDPLKVVIVRDMWLTGFDAPCCNTMYLDKPMKGHNLMQAIARVNRVFANKSRENGGLIVDYVGLAKELRAATQQYTNSTGKGQLAEDVQSVFFKMKEQLEFIRTLFATPIEGKTFDVQAALEKDNPNDLLMAIRFAANHILSLDQLSFDGKAHEQHWFNKKETEPRKKAFLKTAGLVKKGYMLCGTLAEVEPYNQEIAFYDAVRAILTKREQKGTGTNERQILLKKLVNQTVYSEGVIDLFDLLEKPQPQISLLSEEFLQTVKNSPTKNLWVSAMERYLASEIKVKSGTNLTLQKDFERRLKEALNQYHNHNLTVVEILDELFKMSQDFQERLALGKKLGLTKEELAFYEALSQNQSAKDLMGDEVLSKLAKEITETLRKSVTIDWQYKEAVRARIRLLVRRALQKYKYPPDKQEEAVTYVIKQAEEIAEDLTGL

SEQ ID NO: 11218 - protein, 647 aa, Haemophilus influenzae
MALISLTNGYLSFSDAPLLDHAELHIEPNECVCLVGRNGAGKSTLLKIIAGDVLMDDGKIQYEKDLVVSRLEQDPPRNAQGNIFDYVAEGVGHLTDLLKEYHQISVQLEENYSDQILSQLEQVQAKLEHADGWRFENKINEVLLKLGLNPNTKLSALSGGWLRKAALARALVCDPDVLLLDEPTNHLDVEAIEWLENFLLDFQGSIVFISHDRSFIRKMATRIVDLDRGQLVSYPGNYDLYLTTKEENLRVEALQNELFDKRLAQEEVWIRQGIKARRTRNEGRVRALKVMREERRQRRDVMGTAKLQLDTSSRSGKIVFEMEDVSYEIAGKTLLKDFSTTILRGDKIALVGPNGCGKTTFIKLLLGEIQPTSGKIRCGTKLEIAYFDQYRADLDPEKTVMDNVADGKQDIEINGVKRHVLGYLQDFLFPPKRAMTPVKALSGGERNRLLLAKLLLKPNNLLILDEPTNDLDVETLELLEEILTDYQGTLLIVSHDRQFIDNTATECYLFEGKGHLNKYVGGFFDAKQQQANFWASKAVEEQAKAKKSEPLKEESAVKNDRTSKPKSVKLSYKEQRELEQLPQLLEELETKITVLQAEIADPAFFQQAHDITDAKLKALADTEAELETAFLRWEELEEKKNLVEGKA

SEQ ID NO: 11219 - protein, 270 aa, Haemophilus influenzae
MTLKIAIAGAGGRMGCQLIQAVHSAEGVELGAAFERKGSSLVGTDAGELAGIGHLGVAVSDDLESQKDKFDLLIDFTRPEGTLEHIAFCVANNKKMVIGTTGFDENGKVAIKAASDKIAIVFASNFSVGVNLVFKLLEKAAKVMGDYCDIEVIEAHHRHKVDAPSGTALSMGEHIAKTLGRDLKTHGVFCREGITGERKRDEIGFSTIRASDVVGEHSVWFADIGERVEISHKASSRMTFANGAVRAGKWLENKANGLFDMTDVLDLNNL

SEQ ID NO: 11220 - protein, 329 aa, Haemophilus influenzae
MQHLNELVEKAKLAIESIQDKSLTALDEIRVEYFGKKGHFTQLMQELRNVSAEERPAMGAKINEAKQAALEFLNAKKTEWEQAELNSKLEKERVDVSLPGRKVETGGLHPVTMTINRVTKFFSELGFSVENGPEIESDYYNFDALNIPKHHPARADHDTFWFNPELLLRTQTSGVQIRTMEKMQPPIRIMAPGRVYRNDYDQTHTPMFHQIELLYVDKKANFTELKGLLHDFLRAFFEEDLQVRFRPSYFPFTEPSAEVDVMGKNGKWLEVLGCGMVHPNVLRNVGIDPNEYSGFAVGMGVERLTMLRYNVTDLRSFFENDLRFLKQFK

SEQ ID NO: 11221 - protein, 795 aa, Haemophilus influenzae
MKFSEQWVREWVNPAVSTEQLCEQITMLGLEVDGVEAVAGTFNGVVVGEVVECAQHPDADKLRVTKVNVGGDRLLDIVCGAPNCRQGLKVACATEGAVLPGDFKIKKTKLRGQPSEGMLCSFSELGIDVEADGIIELPLDAPIGTDLREYLALDDNAIEISLTPNRADCLSIAGIAREIGVVNKQLVNQLHFEAAPATISDKVQIDLQAPEACPRYLLRVIKNVNVKAPSPMWMQEKLRRCGIRSIDPIVDITNYILLEFGQPMHAFDAAKVTQPVQVRFAKEGEELVLLDGSTAKLQSNTLLIADQNGPLAMAGIFGGAASGVNSETKDVILESAFFAPLAIAGRARQYGLHTDASHRFERGVDFELARKAMERATALLLEICGGEAGEICEASSETHLPKVNTVQLRRSKLDALLGHHIETGSVTEIFHRLGFDVTYANDIWTVTSASWRFDIEIEEDLIEEVARIYGYNSIPNNAPLAHLCMREHKESDLDLARIKTALVDADYQEAITYSFVDPKIQSLLHPHQEALVLPNPISVEMSAMRVSLISGLLGAVLYNQNRQQSRVRLFETGLRFVPDANAEFGVRQEFVLSAVITGTAKSEHWAGKAESVDFFDLKGDLESVLSLTEGGHRVRFVAKQFDALHPGQSAAIELDGQEIGFIGAIHPSISQKLGLNGKTFVFEILWNAIAARNVVQAKEISKFPANRRDLALVVADSVPAGELIAACKQAGGEKLVQVNLFDVYQGVGVAEGYKSLAISLTVQDNEKTLEDEEINAVISAVLAEVKQRFNAELRD

SEQ ID NO: 11222 - protein, 89 aa, Haemophilus influenzae
MLPSNFISSPDYVVLNEKCGVILTMPKIKTVRGAAKRFKKTASGGFKRKQSHLRHILTKKTTKRKRHLRHKSMVAKADQVLVVACLPYA

SEQ ID NO: 11223 - protein, 117 aa, Haemophilus influenzae
MARVKRGVIARARHKKVLKAAKGYYGARSRVYRVAFQAVIKAGQYAYRDRRQRKRQFRQLWIARINAAARQNGLSYSKFINGLKKASVEIDRKILADIAVFDKVAFAALVEKAKSAL

SEQ ID NO: 11224 - protein, 89 aa, Haemophilus influenzae
MSLSTEKKAAIVAEFGRDAKDTGSSEVQIALLTAQINHLQTHFAEHKKDHHGRRGLLRMVSRRRKLLDYLKRTDLALYQSTIARLGLRR

SEQ ID NO: 11225 - protein, 635 aa, Haemophilus influenzae
MVKNLVLWVVVAVIMMTAYQSFNSSSVENSTDYTTFVYDVSNGQVTAARFDANEITVTKTDGSKYSTVMPPLEDKKLLDDLLSKKVKVEGTPFERRGFLSQILISWFPMLFLVGVWVFFMRQMQGGGGKAMSFGKSRAKMLNQDQIKVTFADVAGCDEAKEEVGEIVDFLRDPNKFQNLGGKIPKGILMVGPPGTGKTLLARAIAGEAKVPFFTISGSDFVEMFVGVGASRVRDMFEQAKKNAPCLIFIDEIDAVGRQRGAGLGGGHDEREQTLNQMLVEMDGFSGNDGVIVIAATNRPDVLDPALTRPGRFDRQVVVGLPDVKGREQILKVHMRKVSVAQDVDAMTLARGTPGYSGADLANLVNEAALFAARVNKRTVTMLEFEKAKDKINMGPERRTMIMTDKQKESTAYHEAGHAIVGYLVPEHDPVHKVTIIPRGRALGVTFFLPEGDQISISQKQLESKLSTLYAGRLAEDLIYGEENISTGASNDIKVATNIARNMVTQWGFSEKLGPILYTEDEGEVFLGRSMAKAKHMSDETAHSIDEEVRAIVNRNYARAREILIDNMDILHAMKDALVKYETIEEEQIKQLMNREPVTPPSGWGEPKTQQAAYANSTTNDTKPESAVENTDDFNV

SEQ ID NO: 11226 - protein, 275 aa, Haemophilus influenzae
MKLYANNKCLDLSVPQIMGILNFTPDSFSDSGQFFSLDKALFQVEKMLEEGATIIDIGGESTRPNADEVSEQEELHRVVPVVEAVRNRFDCWISVDSSKAVVMREAANVGMDLINDIRALQEPNALETAVKLALPVCIMHMQGQPRTMQANPYYENVVQDVLAFLQKRTNECLSAGIKKENLIWDMGFGFGKSVQHNYQLLQNLNEFCQIGYPVLAGLSRKSMIGAVLDKPVDQRIIGSAAGALIAVQKGAKILRVHDVAATSDMLKVWQATANA

SEQ ID NO: 11227 - protein, 445 aa, Haemophilus influenzae
MANRKYFGTDGVRGKVGAYPITPDFALKLGWAAGKVLASQGSKMVLIGKDTRISGYMLESALEAGLAAAGLSAAFTGPMPTPAIAYLTRTFRAEAGIVISASHNPYYDNGIKFFSAKGTKLPDEIEEAIEAMLEQPMDCVESAELGKASRINDAAGRYIEFCKGTFPAHLGLEGYKIVVDCANGATYHIAPNVLRELGAEVIEIGTDPNGLNINEKCGATDVTALQAKVVETKADVGLAYDGDGDRIMMVDHLGNKVDGDQILFIIAREALRSGQLKGGVVGTLMSNMSLEIALKMLGVPFLRANVGDRYVLEKMVENDWTLGGENSGHIIIADKNTTGDGIVASLAVLAAMAQHKLSLNELASAVKLFPQVLINVRFAGGENPLESDAVKSVAAEVEKRLEGKGRILLRKSGTEPLIRVMVECQDAELAQQCAEEIAEAVKKIN

SEQ ID NO: 11228 - protein, 129 aa, Haemophilus influenzae
MEKIMKKLTLALVLGSALVVTGCFDKQEAKQKVEDTKQTVASVASETKDAAANTMTEVKEKAQQLSTDVKNKVAEKVEDAKEVIKSATEAASEKVGEMKEAASEKASEMKEAVSEKATQAVDAVKEATK

SEQ ID NO: 11229 - protein, 381 aa, Haemophilus influenzae
MKLGRKPKLVENQLQNKPIIELRSIKKSYGSNTIINDFNLTINNGEFVTILGPSGCGKTTVLRLLAGLEELDSGSIILDGEDITNVPAEKRHINTVFQSYALFPHMTIFENVAFGLRMQKVPNEEIKPRVLEALRMVQLEEMADRKPTQLSGGQQQRIAIARAVVNKPKVLLLDESLSALDYKLRKQMQQELKMLQRQLGITFIFVTHDQEEAITMSDRIVLLRKGKIAQDGSPREIYEDPANLFVARFIGEINVFEATVIERKSEQVVLANVEGRICDIYTDMPVEKDQKLQVLLRPEDIVIEELDENEHSKAIIGHIIDRTYKGMTLESTVEFDHNGMRVLVSEFFNEDDPHMDHSIGQRVGITWHEGWEVVLNDEDNQ

SEQ ID NO: 11230 - protein, 412 aa, Haemophilus influenzae
MISQIDKTELLERFLHYVSFHTQSKPNAKHSPSSVGQMKLAMQLQKELIQLGLENVEVSKYAVVTAFLPANDPNLTKTIGLVAHLDTSPQCSGKNVRPEVIEEYRGGDIALGIGEEFISPVYYSFMQKLVGQTLIVTDGTTLLGADNKAGIAEIMTALSILQKENIPHCNIRVAFTPDEEIGLGIHYFPMEKFSCDWAYTIDGGEVGELEYENFNAATAKVRFFGRNIHTGYAKGKMLNALTLACEFQQVFPVDEVPEKTDGKVGFYHLEDFSGDIEQVELTYLIRDFDEQNFAQRKAFIKNQVEKFNAKKGLKKPIELEIQDSYQNMYDVVKNVPQSIELADRAMKAVGIKPNHKPIRGGTDGAFLASKGLACPNIFTGGYNFHSKHELVSLQGMENTVQVIIEMLKCKDL

SEQ ID NO: 11231 - protein, 160 aa, Haemophilus influenzae
MSKTSIGLDKVQSAELADKLNELLATYQVFYTNVRGYHWNIKGVNFFALHAKFEEIYTNLVARVDEVAERILTLGYTPNNAYSQYLKISRIKEDIAVSEAQECLSGTLQGLKTLLDQQREILAFANNANDEGTASQMSDYIKEQEKLVWMFQAACQTCHN

SEQ ID NO: 11232 - protein, 512 aa, Haemophilus influenzae
MLIGVPRELLENESRVAATPKTVQQILKLGFDVIVEHDAGFKASFEDQAFLEAGAKIGTSAEIWQSDIIFKVNAPTDEEIAQMKEGAALVSFIWRMQNPELMKKLTAKKINVLAMDAVPRISRAQALDALSSMANISGYRAVIEAAHEFGSFFTGQITAAGKVPPAKVLVIGAGVAGLAAIGAANSLGAIVRAFDSRPEVKEQVQSMGASFLEIDFKEEGGSGDGYAKVMSEEFNRRAMELYAEQAKEVDIIITTAAIPGKPAPRLITKEMVDSMKPGSVIVDLAAATGGNCEYTQAGKVVTTENQVKVIGYTDFPSRLPTQSSQLYGTNLVNLLKLLCKEKDGNINIDFEDVVLRGVTVVRDGEEIPPAQIQVSAQPKQETKAAPVAEKKESKPTDPRVKYGVMAGVGVLFLWLASVAPAAFLSHFTVFVLACVVGYYVVWNVSHALHTPLMAVTNAISGIIIVGALLQIRQPTGNLFIDALAFVAILVASINIFGGFRVTQRMLAMFRKG

SEQ ID NO: 11233 - protein, 868 aa, Haemophilus influenzae
MSKSLVIVESPAKAKTINKYLGSQYVVKSSVGHIRDLPTVGSSTGEKAKPISTKGMDAEEKAKIKAEKERNALVKRMGIDPYHDWKANYQILPGKEKVVSELKSLAKKADHIYLATDLDREGEAIAWHLREVIGGNDDRFSRVVFNEITKNAIKQAFEKPEQLNMDRVNAQQTRRFLDRVVGFMVSPLLWKKVARGLSAGRVQSVAVKLLVEREREIKAFQPEEYWEVAVLTNNQNKQAIRLDVTDYKGKKFDPKNQKEAQSAVDFLNVSDYVVTDLETKPTSSRPRAPFITSTLQQTASTRLGFGVKKTMMLAQRLYEAGYITYMRTDSTNLSQDALNMARSYIENHFGAQYLPEKPNFYSSKENAQEAHEAIRPSDIRALPESLEGMEKDAVRLYDLIWCQFLACQMPPAQYDSSTLTVTAGDYTLKAKGRILRFDGWTKVLPQIGKNPEDQELPSVTVSEKLALKEVQPTQHFTKPPARFTEAALVKELEKRGIGRPSTYAAIISTIQERGYVRTENRRFYAEKMGEIVTDRLNESFGELMNYDFTANMEDTLDKIASGSVNWKTELNQFFKDFSSQLSKAELDELEGGMRPNSLVETDIKCPTCGRNMAIRTASTGVFLGCTGYALPPKERCKTTINLIPEAELLNVLDESSETKALMDRKRCTKCGTAMDSYVIDAHRKIHICGNNPNCDGYLIEEGSFKIKGYDGPVVECDKCGADMHLKLGRFGKYMGCTNCDNTRKILKNGEVAPPKEEPVHFPELKCEKSDAYFVLRDGASGVFMSAHNFPKSRETRPVKIAELVQYRERLPEKLAYLADAPQKDPEENEAIVRFSRKEKKQYVTSEKEGKATKWIVDFTNGKWVERKK

SEQ ID NO: 11234 - protein, 643 aa, Haemophilus influenzae
MPIITLPDGSQRQFDRPVSVLEVAQDIGAGLAKATIAGRVNGERRDACYVIEQDATLEIITAKDEDGLEIIRHSCAHLLGHAIKQLFPDVKMAIGPTIENGFYYDVDLDRSLTQEDIDAIEKRMLELAKTNYDVVKKRVTWQEARDTFEKRGEPYKMAILDENIERTATPALYHHLEYIDMCRGPHVPNMRFCQHFKLQKVAGAYWRGDSKNKMLQRIYGTAWADKKQLAEYLTRLEEAAKRDHRKIGKALDLYHMQEEAPGMVFWHNDGWTIFRELETFVRTKLKQYDYQEVKGPFMMDRVLWEKTGHWQNYADLMFTTQSENREYAIKPMNCPGHVQIFNQGLKSYRDLPIRMAEFGSCHRNEPSGSLHGLMRVRGFTQDDAHIFCTEDQIESEVTSCIKMVYDIYSTFGFTNIAVKLSTRPENRIGSDEMWDRAEAGLAAALAHNGLEYEIQEGEGAFYGPKIEFALRDCLGREWQCGTVQLDFALPGRLDATYVAEDNSRKTPVMIHRAILGSIERFIGIITEEYAGFFPAWLAPTQAVVMNITDSQADYVQKVAKQLSDVGLRVKTDLRNEKVGFKIREHTLRRVPYMLVCGDKEIAEGKVAVRTRKGADLGTFTVEEFAEILKNQVRSRELKLLNEE

SEQ ID NO: 11235 - protein, 473 aa, Haemophilus influenzae
  VARIANT (1)...(473): Xaa = Any Amino Acid
MVKDFSFFIYDYESFGVNPATDRPAQFAGIRTDADFNIIGEPIMFYCKQTNDYLPAPEAVMVTGITPQECNEKGLSEPEFAANILAEFSQPNTCVMGYNNIRYDDEMTRYTFYRNFIEPYEYSWKNGNSRWDLLDLVRACYALRPEGINWAYDDDGMPSFRLEKLTKANSIEHENAHDAMADVYATIAMAKLIKEKQPKLFQYFFENRGKKEIEKLVDTGAMTPLVHVSGMLGNYRGNCTWVAPLAWHPTNQNALIVCDLTGDIDNLLAKSADELRADLYTKKLELEERGVSSVPLKLVHINKCPILAPAKTLLPETANRLGIDRQLCLDNLAKLRASFDIREKVADIFNEERQFASNDNVETELYNGFFSNADKNNMAILRSLPAEKLSEHGLAFEDKRILELLFHYRARHFYKTLTRAEQIKWKKYRQNKLEKSAVEFEASLQRLVEXHSDNSEKLSLLQQVYEYGIKLLG

SEQ ID NO: 11236 - protein, 315 aa, Haemophilus influenzae
MLTKSRKYFNQTWIESLFKQTTALFALLVFILLAAILISLVIGSWESIKRFGGSFLLETYWDPVQEQYGAIIPILGTLITAGIALFIAVPISFGIAIFLTELAPNWLKRPISIAIEMLAAIPSIIYGMWGLFVFVPLFQEHIQPVLIDNLGNLPGLELFFSGVPFGVGLFTAGLVLAIMIIPFIASVMRDVFSIVPPMLKEGAYGLGATTWEVVRQVIVPHTRIGLVGSVMLGLGRALGETMAITFIIGNSFQLPNSLFSPSTSIASAIANEFNEAGGLQKSALMELGLLLFVITTMVLILSRLMITKMQQTKGK

SEQ ID NO: 11237 - protein, 333 aa, Haemophilus influenzae
MQHNQLLEQLYSGHSLSTSESTALFNAVIQGELSNEQIAAMLIALKVRGANTEEISGAVAASLQNAKAFPYPNYPFADIVGTGGNGQNTINISTTSAIVAASMGAKIAKHGNRSVSSKSGASDVLTALSVNVNVTPEQARQALDEIGVCFLFAQQYHSGFRHVAPVRAALKTRTIFNILGPLINPARPTYHLLGVYAPELVKTYAETAVALEHQHSFVVHGSGLDEVALHGETQVAEIKNGKIEYFTLTPEDFGLKTQSLESLRGGEPQENAQYLTALLQGKGKAEHANAVAANTALLLKLFGYDDLKQNVQNVLAHLVSGKAFETLQKLTTY

SEQ ID NO: 11238 - protein, 954 aa, Haemophilus influenzae
MTQKFEMADRFNPSAVEQALYQRWEESGYFKPSENENAPSYCIAIPPPNVTGSLHMGHAFQQTLMDTLIRFNRMEGHNTLWQTGTDHAGIATQMVVERKIAAEEGKTRHDYGREAFINKIWDWKAYSGGTISQQMRRLGNSIDWERERFTMDDGLSNAVKEVFVRLHEEGLIYRGKRLVNWDPKLHTAISDLEVENKESKGSLWHFRYPLANDAKTADGKDYLVVATTRPETMLGDTAVAVHPEDERYQSLIGKTVVLPLANREIPIIADEYVDREFGTGVVKITPAHDFNDYEVGKRHNLPMVNVLTLNANIRDEAEIIGTDGKPLAGYEATIPADYRGLERFAARKKIVADFEALGLLDEIKPHDLKVPYGDRGGVPIEPMLTDQWYVSVKPLADVAIKAVEDGEIQFVPKQYENLYFSWMRDIQDWCISRQLWWGHRIPAWYDAEGNVYVARNEEEVRSKYNLDSAVELKQDEDVLDTWFSSGLWTFSTLGWPEQTKELKMFHPTDVLITGFDIIFFWVARMIMFTMHFVKDENGKPQVPFKTVYVTGLIRDEQGQKMSKSKGNVLDPIDMIDGISLEDLLEKRTGNMMQPQLAEKIAKATRKEFAEGIAAHGTDALRFTLAALASNGRDINWDMKRLEGYRNFCNKLWNASRFVLTNEKLDLSQGEIEFSLADRWIQSEFNRTVETFRSSLSQYRFDLCANAIYEFTWNQFCDWYLELTKPVFANGNAAQIRAASQTLVHVLEKLLRLAHPLIPFITEEIWQKVKGFVGITADSIMLQPFPQVEESGFDPEAEAEIEWLKEVIVAVRNIRAESNIAPSKGLDLLFRNLSAENAKILEKQTALLKAMAKLDNVQVLATNETAPLAVAKLVGNAELLVPMAGFINKEAELARLTKEIEKYQNEVKRIENKLSNEAFVAKAPEAVIAKEREKQAEYQSGLEKIQEQYKAIEAL

SEQ ID NO: 11239 - protein, 295 aa, Haemophilus influenzae
MGHFSEELQQVQTRINRFLEAQFEGIESHNAPLLEAMKYALLLGGKRVRPFLVYATGQMLGAEKQTLDYAAAAIEAIHAYSLIHDDLPAMDDDNLRRGHPTCHIQFDEATAILAGDALQSFAFEILTKTPNISTEQKLALIQILAQGAGVQGMCLGQSLDLISEHKQISLSELELIHRNKTGALLIAALKLGFICSPHFTDKRLEQSLTQYAEAIGLAFQVQDDILDIEGDSAEIGKQVGADLDLDKSTYPKLLGLSGAKQKAQDLYQSALSELEKIPFDTTVRALAEFIITRKS

SEQ ID NO: 11240 - protein, 130 aa, Haemophilus influenzae
  VARIANT (1)...(130): Xaa = Any Amino Acid
MAENQNYGTGRRKSSSARVFIKPGSGKITINQRELDVYFGRETARMVVRQPLELVXLTDKLDLYITVKGGGISGQAGAIRHGITRALMEYDETLRPALRAAGFVTRDARRVERKKVGLHKARRRPQYSKR

SEQ ID NO: 11241 - protein, 142 aa, Haemophilus influenzae
MKTFVAKPETVKRDWYVVDATGKTLGRLATELARRLRGKHKAEYTPHVDTGDYIIVINADKVAVTGRKETDKLYYWHTGYVGGIKQATFKEMIARRPEAVIEIAVKGMLPKGPLGRAMFRKLKVYAGGEHQHAAQQPQVLDI

SEQ ID NO: 11242 - protein, 404 aa, Haemophilus influenzae
MLTLDQARSKMLEQLPFPTQTEYLNLQEAANRICAEDIISPINVPSFDNSAMDGYAVRLSDLQQSLTLSVAGKSFAGNPFQEEWPSKSAVRIMTGAMIPEGTDAVIMQEQVTLNEDGTITFSELPKPNQNIRRIGEDVKKGDVVLEQGAQLTPVSLPLLASLGIAEVKCYRQLKVGVLSTGDELVEVGKPLQSGQIYDTNRFTVKLLLEKLHCEVIDLGLLPDNEAEFEKAFIAAQSQADLVITSGGVSVGEADFTKAVLEKVGQVNFWKIAIKPGKPFAFGKLENAWFCGLPGNPVSALVTFYQLVQPLIAKLQGQKQWKKPPHFSAIATMNLKKAVGRLDFQRGFYYINEQGQIEVQSVGFQGSHLFSAFVKSNCFIVLEQERGNVSAGETVTIEPFNHLLG

SEQ ID NO: 11243 - protein, 445 aa, Haemophilus influenzae; identical to SEQ ID NO: 11227

SEQ ID NO: 11244 - protein, 275 aa, Haemophilus influenzae; identical to SEQ ID NO: 11226

SEQ ID NO: 11245 - protein, 89 aa, Haemophilus influenzae; identical to SEQ ID NO: 11224

SEQ ID NO: 11246 - protein, 337 aa, Haemophilus influenzae
MQPDSYPKILFGLTLLLVITAVISLGIGRYSLSVPQIGQILWAKATALEIDPVQQQVIFQVRLPRILTALCVGAGLALSGVVLQGIFRNPLVNPHIIGVTSGSAFGGTLAIFFGFSLYGLFTSTILFGFGTLALVFLFSFKFNQRSLLMLILIGMILSGLFSALVSLLQYISDTEEKLPSIVFWLMGSFATSNWEKLLFFFVPFLLCSSILLSLSWRLNLLSLDEKEAKALGVKMAPLRWLVIFLSGSLVACQVAISGSIGWVGLIIPHLSRMLVGANHQSLLPCTMLVGATYMLLVDNVARSLSDAEIPISILTALIGAPLFGVLVYKLKRGGMNE

SEQ ID NO: 11247 - protein, 406 aa, Haemophilus influenzae
MRRTVITGFGIISSIGNNKEEVLASLKAGKSGIEVVPEFVEMNMRSHVAGTIKLNPSEHIDRKVFRFMGDAAAYAYLSMREAIEDAGLTEDQVSNDRTGLVIGAGTGSAHNQLVACDAVRGPRGVKAIGPYAVTKTMASSVSACLATPYKIRGVNYSMSSACATSAHCIGHAVELIQLGKQDVVFAGGAEELSWECATEFDAMGAVSTKYNETPEKASRAYDANRDGFVIAGGGAVVVVEELEHALARGAKIYAEIVGYGATSDGYDMVAPSGEGAERCMKQAMATVDTPIDYINVHGTSTPVGDVKELGAIKNVFGDKIPAISSTKSMTGHSLGAAGAHEAIYTLLMLDNDFIAPSINIETLDEAAEGCNIVTETKENAGLQTVMSNSFGFGGTNATLIFKRYNG

SEQ ID NO: 11248 - protein, 227 aa, Haemophilus influenzae
MNNYLLKCENINKFYQEGENQTQVLKGVSFSMEPAELVAIVGSSGSGKSTLLHTLGGLDQPSSGEVFINGQSLQKASANELAALRNRYLGFVYQFHHLMADFTALENVMMPMLIGHQNKTEAKDRAEKMLSAVGLSHRITHRPSALSGGERQRVAIARALVNNPSLVLADEPTGNLDHKTTESIFELIQQLNQEQNIAFLLVTHDMGLAEKLSRRLVMQDGLLKEGA

SEQ ID NO: 11249 - protein, 380 aa, Haemophilus influenzae
MDAFKQQLEQLSAKNQYRSIPDLVHQGRYITRENRKMLNMSSNDYLGLASNENLRQSFLQQYGGNFPSFTSSSSRLLTGNFPIYTDLEELVAQRFQRESALLFNSGYHANIGILPALTTTKSLILADKLVHASMIDGIRLSQCEFFRYRHNDYEHLKNLLEKNVGKFDRTFIVTESVFSMDGDVADLKQLVQLKKQFPNTYLYVDEAHAVGVYGQNGLGIAERANVIADIDLLVGTFGKALASMGAYVVCDQILKECLINQMRPLIFSTALPPFNVAWTHFIFERLPQLSKERTHLEQLSAFLRQEVEHRTQIMPSQTCIVPYILGENEATLAKAKDLQEQGYYCLPIRPPTVPKNTSRIRLSLTADMTADEVRQFAVHL

SEQ ID NO: 11250 - protein, 430 aa, Haemophilus influenzae
MVDEQSLLAFDTQHIWHPYSSVSSDMPLYAVERADGVMITLKDGRRLIDGMSSWWAALHGYNHPRLNAAAQNQLAKMSHIMFGGFTHDPAVELAQLLVQILPNGLDKIFFADSGSVAVEVAMKMAIQYQHAKGEVQRQKFATIRSGYHGDTWNAMSVCDPTTGMHHLFHHSLPVQYFLPQPNIPFNESWNDCAIEPLADLLKKKGNEIAALILEPVVQGAGGMYFYSPTYLVKAQALCKQYGILLIFDEIATGFGRTGKLFAAEHAGISPDIMCIGKALTGGYLTLSASITTTEIAQTICSGEAKCFMHGPTFMANPLACAIAAESIRLLLESPWQQNIQRIESSLKQQLSPLSEKDYVKEVRALGAIGVVEMKSAVNMKTLVPRFVEQGVWIRPFGKLVYVMPPFVIKDDELQKLTEGMILALTQEYEH

SEQ ID NO: 11251 - protein, 361 aa, Haemophilus influenzae
MMKDSIIAKLESLKERYEELEALLGDVSVISDQDKFRAYSKEYSQLEEVVKCFNRWTQLNQNIEEAEILLDDPEMKEMAQMEIEESKAEIEEVEQQLQILLLPKDPNDEYNCYLEIRAGTGGDEAGIFAGDLFRMYSRYAESKRWRVEMLSANESEQGGYKEVIVKVTGEGVYGQLKFESGGHRVQRVPKTESQGRIHTSACTVAVMPELPESEMPEINPADLRIDTYRSSGAGGQHVNTTDSAVRITHIPTGIVVECQDERSQHKNKAKAMSVLASRIVQAEQERQAAEQTDMRRNLLGSGDRSDKIRTYNYPQGRVTDHRINLTIYRLDEVMNGKIDELIQPIITEYQADQLAALSEQN

SEQ ID NO: 11252 - protein, 478 aa, Haemophilus influenzae
MSRRLRRTKIVCTMGPSTDRDNNLEKIIAAGANVVRMNFSHGTPDDHIGRAERVRSIAKKLGKTVAILGDLQGPKIRVSTFKDGKIFLNVGDKFILDAELPKGEGTQESVGLDYKTLPQDVVPGDILLLDDGRVQLKVLSTDGAKVFTEVTVGGPLSNNKGINKLGGGLSADALTEKDKADIITAARIGVDFLAVSFPRSSADLNYARELAQQAGLNAKIVAKVERAETVANDEAMDDIILASDVIMVARGDLGVEIGDPELVGVQKKLIRRSRQLNRAVITATQMMESMISNPMPTRAEVMDVANAVLDGTDAVMLSAETAAGQYPSETVAAMASVCLGAEKMPSINVSRHRMDKEFETIEESVAMSAMYAANHMKGVAAIVTLSSTGRTPLLMSRISSGLPIFALSRNQETLNLCALYRGVTPIYHGEESRTEAGAKAAPQSLKEKGYLSTGDLVLVTQGGQGATQTNVCRTLIVE

SEQ ID NO: 11253 - protein, 504 aa, Haemophilus influenzae
MDFSTVFYFLFSPHFSLKSNRYLRYHRRHSSIEISPMASQPQIKSSDKKTAQVSIPPHSTEAEQAVLGGIMLSNQHWDGIAERVIADDFYTFQHRLIFTEMEHLMRNQSPIDLITLDQALRSRGVSDEVGGFAYLAELSNNTPNAINILAYADIVREKAILRELISVGNRIAENSYSPKGQDIKLILDEAEREVFAIAEKRTTSSEGPQNVINVLESTIEKIDILSKLENHSGVTGVTTGFTDLDKKTAGLQPSDLIIVAARPSMGKTTFAMNLCENAAMASEKPVLVFSLEMPAEQIMMRMIASLARVDQTKIRTGQNLDEIEWNKIASVVGMFKQKNNLFIDDSSGLTPTDVRSRARRVYRENGGLSMIMVDYLQLMRAPAFSDNRTLEIAEISRSLKALAKELQVPVVALSQLNRTLEQRGDKRPVNSDLRESGSIEQDADLIMFIYRDEVYNDNSEDKGVAEIIIGKQRNGPIGRVRLKFNGQFSRFDNLAEQREYRDDY

SEQ ID NO: 11254 - protein, 360 aa, Haemophilus influenzae
MNVKPATAKISSHALKQNLEIIKQKAPNSKIIAVVKANAYGHGVVFVASTLEQNVDCFGVARLEEALALRSNGITKPILLLEGFFNEQDLPILAVNNIETVVHNHEQLDALKRANLPSPIKVWLKIDTGMHRLGVALDEVDYFYQELKKLPQIQPHLGFVSHFSRADELESDYTQLQINRFLSVTKDKQGERTIAASGGILFWPKSHLECIRPGIIMYGISPTDTIGKEFGLTPVMNLTSSLIAVRHHKQGDPVGYGGIWTSPRDTKIGVVAMGYGDGYPRDVPEGTPVYLNGRLVPIVGRVSMDMLTVDLGADSQDLVGDEVILWGKELPIETVAKFTGILSYELITKLTPRVITEYVD

SEQ ID NO: 11255 - protein, 577 aa, Haemophilus influenzae
MNIQSILSDKIKQAMILAGADQSCDALIRQSGKPQFGDYQANGIMAAAKKLGLNPREFAQKVLDNLQLSDIAEKLEIAGPGFINIFLNPTWLTTEISAALSHKNLGIQATNKQTVVIDYSSPNVAKEMHVGHLRSTIIGDAVARTLEFLGHNVIRANHVGDWGTQFGMLIAYLEKMQNEHASEMELQDLEAFYREAKKHYDEDEVFAEKARNYVVKLQSGDEYCRTMWKRLVDITMQQNQHNYARLNVTLTEKDVMGESLYNPMLPSIVKDLKKQGLAVENDGALVVYLDEFKNKDGDPMGVIVQKKDGGFLYTTTDIAAAKYRYETLKANRALVFSDTRQSQHMQQAWLITRKAGYVPDSFSLEHKNFGMMLGKDGKPFKTRTGGTVKLADLLDEAIERATVLINEKNTNLSNDEKEAVIEAVGIGAVKYADLSKNRTTDYVFDWDNMLSFEGNTAPYMQYAYTRIRSIFNKTDINSTALLAAPLTIKDDKERTLAIKLLQFEEAVQTVGKEGTPHVLCAYLYELAGIFSSFYEHCPILNAEDESIKLSRLKLALLTEKTLKQGLTLLGIKTVEKM

SEQ ID NO: 11256 - protein, 163 aa, Haemophilus influenzae
MRRILSVLLENESGALSRVVGLFSQRAFNIESLTVAPTDDPTLSRMTIEAVGDAQALEQIEKQLHKLVDVFKVVNLSEQEHIEREIVLAKVRAVGSSRDEIKRLADIFRGQIVDVTPKSYTIQLSGTNDKVDAFISALKEETTLLEIVRSGLISVSRGEKNIL

SEQ ID NO: 11257 - protein, 573 aa, Haemophilus influenzae
MKKLSGAEMVVQSLRDEGVEYVFGYPGGAVLDIYDAIHTLGGIEHILVRHEQAAVHMADGYARSTGKVGCVLVTSGPGATNAITGILTAYTDSVPMVIISGQVMSNLIGSDAFQECDMLGISRPVVKHSFIVKKAEDIPSTLKKAFYIASTGRPGPVVVDIPKDTVNPNFKYPYEYPEYVELRSYNPTVNGHKGQIKKALKALLVAKKPILFVGGGAITAECSEQLIQFAQRLNLPVTSSLMGLGAYPSTDKQFLGMLGMHGTLEANTAMHESDLILGIGVRFDDRTTNNLEKYCPNAKVIHIDIDPTSISKNVPVAIPIVGNAKNVLEEFLGLLNEEGLKSQTDLESWWQEINQWKAKKCLEFDRTSGVIKPQQVVEAVYRLTKGQAYVASDVGQHQMFAALHYPFDEPRHWINSGGAGTMGFGFPAALGVKLAHPEGTVVCVTGDGSIQMNIQELSTATQYGIPVVIICLNNHFLGMVKQWQDLIYSGRHSQTYMNSLPDFAKLAESYGHVGIKIATPDELESKLQEAFSIKNKLVFVDINVDESEHVYPMQIRGGAMNEMILSKPQEETN

SEQ ID NO: 11258 - protein, 529 aa, Haemophilus influenzae
MEAVQLDKNQEPNYKGYSGSLIHPAFQQQTTKREKPSTPLPSLDLLLKYPPNEQRITPDEIMETSQRIEQQLRNFNVKASVKDVLVGPVVTRYELELQPGVKASKVTSIDTDLARALMFRSIRVAEVIPGKPYIGIETPNLHRQMVPLRDVLDSNEFRDSKATLPIALGKDISGKPVIVDLAKMPHLLVAGSTGSGKSVGVNTMILSLLYRVQPEDVKFIMIDPKVVELSVYNDIPHLLTPVVTDMKKAANALRWCVDEMERRYQLLSALRVRNIEGFNEKIDEYEAMGMPVPNPIWRLGDTMDAMPPALKKLSYIVVIVDEFADLMMVAGKQIEELIARLAQKARAIGIHLILATQRPSVDVITGLIKANIPSRIAFTVASKIDSRTILDQGGAEALLGRGDMLYSGQGSSDLIRVHGAYMSDDEVINIADDWRARGKPDYIDGILESADDEESSEKGISSGGELDPLFDEVMDFVINTGTTSVSSIQRKFSVGFNRAARIMDQMEEQGIVSPMQNGKREILSHRPEY

SEQ ID NO: 11259 - protein, 475 aa, Haemophilus influenzae
MGILTHGKLSTANTENKMAKAPKTAYVCNDCGAEFSRWQGQCSACKAWNTITEVRLISTAKSKNDRFSGYAGETQAKIQTLSEISLQETPRFSSGFSELDRVLGGGIVPGSAILIGGHPGAGKSTLLLQVMCGLAKNMTALYVTGEESLQQVAMRASRLGLPSDQLKMLSETSVEQICNLADQLKPQIIVVDSIQVMHLADIQSSPGSVAQVRECASFLTRYAKTRQVAIIMVGHVTKDGTLAGPKVLEHAIDCSLLLEGEADSRYRTLRSHKNRFGAVNELGVFGMTEQGLREVKNPSAIFLSRGDEITSGSSVMVLWEGTRPLLVEIQALVDHSMLANPRRVAVGLEQNRLALLLAVLHRHGGLQMADQDVFVNVVGGVKVSETSADLALLLALISSFRNRPLPQDLVIFGEVGLAGEIRPVPSGQERISEAAKHGFKRAIVPFGNKPKSAVENMQVFTVKKLTDALAVLDNL

SEQ ID NO: 11260 - protein, 420 aa, Haemophilus influenzae
MEIISQYGSWLVWITAVFGFFMAFGIGANDVSNSMGTSVGSGTITAKQAIIIALIFESAGAYLAGGEVTQTIKSGVIEPIQFVDTPDILALGMLSTLFASGAWLFIATKMGWPVSGTHTIIGAIIGFACITIGPSSVDWSKIGSIVGSWFVTPVIAGILAYAIFASTQKLIFDTEQPLKNAQKYGPYYMGITVFVLCIVTMKKGLKHVGLNLSNSETLIISLAISLIGMFFFHFYFKSKIFTQSANKGTFGAVEKVFSILMLLTACAMAFAHGSNDVANAIGPLSAVVSIVNEGGKIVSGGALTWWILPLGALGIAVGLITMGQKVMATVGSGITDLTPSRGFAAQFATAMTVVVASGTGLPISTTQTLVGAILGIGFARGIAALNLTVIRNIISSWIVTLPAGAFFAIIIFYVLRTIFN

SEQ ID NO: 11261 - protein, 315 aa, Haemophilus influenzae
MPDIKLFAGNATPELAKRISERLYISLGDATVARFSDGEIQVQINENVRGADVFIIQSTCAPTNDNLMELVVMVDALRRASAGRITAVIPYFGYARQDRRVRSARVPITAKVVADLLSIVGIDRVLTCDLHAEQIQGFFDVPVDNVFGSPVLIHDILKKSDLKNPIVVSPDIGGVVRARAVAKLLNDTDMAIIDKRRPRANVAQVMHIIGDVADRDCILVDDMIDTGGTLCKAAEALKERGAKRVFAYATHAVFSGAAAKNLASDAIDEVVVTDTIPLSEEMKAIGKVRVLTLSSMLAEAIRRISNEESISAMFN

SEQ ID NO: 11262 - protein, 401 aa, Haemophilus influenzae
  VARIANT (1)...(401): Xaa = Any Amino Acid
MTDINTVLAELKRGTDEILSEADLIEKLKENRPLKVKLGADPTAPDIHLGHTVVLNKLRQFQQLGHEVYFLIGDFTGMVGDPSGKNATRPPLSREDVLRNAETYKEQIYKILDPQKTKIVFNSEWLSKLGTXGMIRLASNYTVARMLERDDFKKRFGNNQPIAIHEFIYPLLQGYDSVALDADVELGGTDQKFNLLVGRELQKSAGKKPQVAITLPLLVGLDGEKKMSKSLGNYIGVTEAPSDMFGKVMSISDELMWDWYNLLSFRPLNEIAQLKSEVENGKNPRDVKILLAKELIARFHNEEAANAAEQEFINRFQKGAMPDEMPEFTFSGEMGLATLLKEAGLVPSTSEAIRSAQQGGVKINGEKVDNVKDNAPKGTNVYQVGKRKFARVRLNKVDTVK

SEQ ID NO: 11263 - protein, 204 aa, Haemophilus influenzae
MFTGIVQGTAPIHSIKEKANFRTQVVKLLPEMRKDLEIGASIANNGVCLTVTEINGDLVSFDLMQETLKITNLGTVKVGDYVNIERAMQMGTEIGGHLLSGHIYCTAKISDIIASENNRQIWFELPSADVMKYILTKGFVAVDGISLTIGEVRDTQFCVNLIPETLQRTLMGRRKVGDIVNIEIDPQTQAIVDTVENYLQSKNF

SEQ ID NO: 11264 - protein, 432 aa, Haemophilus influenzae
MGKSVVILGAQWGDEGKGKIVDLLTDRVKYVVRYQGGHNAGHTLIINGEKTVLRLIPSGMLHPNVTCLIGNGVVVSPEALMKEMGELESRGIKVRERLLISEACPLILPYHVAMDHAREAALGKKAIGTTGRGIGPAYEDKVARRGLRVGDLFNKEAFAEKLKNILEYYNFQLVNYYKVEPVDYQKTLDDVMAIADVITGMVADITTILDTARKNGEHILFEGAQGTMLDIDHGTYPYVTSSNTTAGGVATGSGFGPRNLDYVLGIIKAYCTRVGGGPFTTELFDDVGAEIARKGNEFGAVTGRPRRCGWFDAVAIRRAIQLNSISGFCMTKLDVLDGFDEVKICVAYKMPNGEIVEYAPLAAKDWEGVEPIYETLPGWKENTFRITDVNKLPQNCINYIKRIEEVTGVPIDILSTGPDRVETMILREPFAA

SEQ ID NO: 11265 - protein, 336 aa, Haemophilus influenzae
MATIKDVAKMAGVSTTTVSHVINKTRFVAKDTEEAVLSAIKQLNYSPSAVARSLKVNTTKSIGMIVTTSEAPYFAEIIHSVEEHCYRQGYSLFCVTHKMDPEKVKNHLEMLAKKRVDGLLVMCSEYTQDSLDLLSSFSTIPMVVMDWGPNANTDVIDDHSFDGGYLATKHLIECGHKKIGIICGELNKTTARTRYEGFEKAMEEAKLTINPSWVLEGAFEPEDGYECMNRLLTQEKLPTALFCCNDVMALGAISALTEKGLRVPEDMSIIGYDDIHASRFYAPPLTTIHQSKLRLGRQAINILLERITHKDEGVQQYSRIDITPELIIRKSVKSIL

SEQ ID NO: 11266 - protein, 291 aa, Haemophilus influenzae
MAENRYELNKNLAQMLKGGVIMDVQNPEQARIAEAAGAAAVMALERIPADIRAVGGVSRMSDPKMIKEIQGAVSIPVMAKVRIGHFVEAQILEAIEIDYIDESEVLSPADNRFHVDKKEFQVPFVCGAKDLGEALRRIAEGASMIRTKGEPGTGDIVQAVRHMRMMSQEIRRIQNLREDELYVAAKDLQVPVELVQYVHKHGKLPVVNFAAGGIATPADAALMMQLGAEGVFVGSGIFKSGDPIKRASAIVKAVTNYRNPQILAQISEDLGEAMVGINENEIQILMAERGK

SEQ ID NO: 11267 - protein, 175 aa, Haemophilus influenzae
MLEKLGIESVELRNLKNFQQHYSDLSGLILPGGESTAIGKLLRELYMLEPIKQAISSGFPVFGTCAGLILLAKEITSQKESHFGTMDIVVERNAYGRQLGSFYTEADCKGVGKIPMTFIRGPIISSVGKKVNILATVNNKIVAAQEKNMLVTSFHPELTNNLSLHKYFIDICKVA

SEQ ID NO: 11268 - protein, 283 aa, Haemophilus influenzae
MTDLTGILYIVATPIGNLQDITQRALETFAQVDLIAAEDTRHSGLLLSHYGIKKPFFALHDHNEQEKAHILVEKLKQGSNIALISDAGTPLISDPGFHLVRQCREAGIRVVPLPGACAAITALCASGIASDRFCFEGFLPAKSKARKDKLENIAEEDRTLIFYESTHRILDTLEDMQAVLGEERYIVLAREMTKTWETITGNTIKNLREWLLEDPNRTKGEMVLIVEGKPKSDNNDEISPQAVKALELIAEELPLKKAAAIVAELYGYKKNALYQFGLAHLEK

SEQ ID NO: 11269 - protein, 781 aa, Haemophilus influenzae
MDRFHKNTISCVLNPVLNNNKKAHTMNKSLMVTKRDGTQEQINLDKIHRVITWAAEGLDNVSVSQVELRSHIQFYEGIRTSDIHETIIKAAADLISKDSPDYQYLAARLAIFHLRKKAYGHFDPPRLYDHVKKLVRMEKYDQALLDDYTREEWDTMDGFIDHWRDMTFSYAAVKQLEGKYLVQNRVTGEIYESAQFLYLLVSASLFSKYPKETRLDYVKRFYDATSTFKISLPTPIMAGVRTPTRQFSSCVLIECDDSLDSINATASAIVKYVSQRAGIGINAGAIRALGSEIRGGEAFHTGCIPFYKYFQTAVKSCSQGGVRGGAATLYYPIWHLEAENLLVLKNNRGVEDNRVRHMDYGVQLNKLMYQRLIKGSEITLFSPSDVPGLYEAFFADQDKFEELYVKYEQDPTIRKRTVKAVEIFSLLMQERASTGRIYIQNVDHCNTHSPFDPQVAPVRQSNLCLEIALPTKPLQHINDENGEIALCTLSAFNLGKIENLDELEELADLAVRSLDALLDYQDYPVVAAKRSSLARRSLGIGVINYAYYLAKNGVRYSDGSANDLTHRTFEAIQYYLLKASMNLAKEQGACEYFNETTYAKGILPIDTYKKDLDSLTQEPLHYDWESLRKDIQEFGLRNSTLTALMPSETSSQISNATNGIEPPRGHVSIKASKDGILKQVVPEYENLMDNYELLWDIPSNDGYLHLVGIMQKFVDQAISANTNYDPKRFEDGKVPMKVLLKDLLTAYKYGLKTLYYQNTRDGAEDVQEDLDDGCAGGACKI

SEQ ID NO: 11270 - protein, 409 aa, Haemophilus influenzae
MAIEILVPDLPESVADATVATWHKKLGDTVKRDEVIVEIETDKVVLEVPALSDGVLAEVVQAEGETVVSKQLLGKISTAQEGDVSSATLKATNEPTPSDRQNAAIENSHNHNADQSPVIRRLLAEHDLQADQIQGSGVGGRLTREDIEREIAKRQAQQVKQEAATEQNTISTVAYSARSEKRVPMTRLRKRIAERLLEAKNSTAMLTTFNEVDMQPIMTLRKTYGEKFEKQHSVRLGFMSFYIKAVVEALKRYPEVNASIDGDDVVYHNYFDISIAVSTPRGLVTPVLRDCDKLSMAEIEKQIKALAEKGRDGKLTVEDLTGGNFTITNGGVFGSLMSTPIINPPQSAILGMHAIKERPIALNGQVVIRPMMYLALSYDHRLIDGRESVGFLVTIKELLEDPTRLLLEI

SEQ ID NO: 11271 - protein, 950 aa, Haemophilus influenzae
MERKYCFKYHNKEVIMQQNKAFDDWLASTALGGANQSYIEELYESYLSDPQSVEESWRKTFDSLPKTTALEQPHTPVRDYFRRLARENHNEAVTVIDPAAGAKLVKVLQFINAYRFRGHLEANLDPLNYYRWKVSFVPELDYRHHGFTEQDLNETFNINHYVYKRDTIKLGELAQMLKETYCGSIGLEFMHVQDMEQKMWLQSKMESLLDKPLFTSEERVNFLRELTAADGLERYLGAKFPGAKRFSLEGSDAFIPLMKEIIRHSSRQGVNDVVMGMAHRGRLNMLVNVLGKKPENLFDEFAGKHSSERTGDVKYHQGFSSDFAVDDKRVHLTLAFNPSHLEIVSPVVIGSVRSRQTRMNDTEHSKVLAITVHGDSAVAGQGVVQETLNMSNTRGYSVGGTIRIVINNQIGFTTSNPNDTRSTEYCTDIAKMIQAPIIHVNGDDPEAVAFAARMAVEYRNLFKRDIFIDLISYRRHGHNEADEPLATQPMMYSIIKKHPTPRKVYADRLVSEGVMTEEQVTEMANDYRDALDNGDRVVSEWREMDTAKMDWLQYLNYDWTAPYESKFSQERFLTLAKRVCEYPESLRAHPRVEKIYNDRKAMYQGEKLLDWGMAETMAYATLLDEGVNVRLSGEDAGRGTFFHRHAVVHNQNDGTGYVPLTHLHANQGRFEVWDSVLSEESVLAFEYGYATTDPKTLTIWEAQFGDFANGAQIVIDQFISSGEQKWGRMCGLVMLLPHGYEGQGPEHSSARLERYLQLCAEQNMQVCVPSTPAQVYHMLRRQSLRKMRRPLIAISPKSLLRHPLAVSSLDELINGTFQTVIGEIDELDPKDVKRVVMCSGKVYYDLLEQRRANNQKDVAIIRIEQLYPFPHEDVKKALEPYAHVTDYVWCQEEPLNQGAWYCSKHNFESAIPESVKLKYAGRPASASPAVGYMSLHTKQQKQLVEDALSF

SEQ ID NO: 11272 - protein, 223 aa, Haemophilus influenzae
MSFAQQKLSELAVSIPGATKIFREYDLDFCCGGSVLLEVAAQQKNLNLAEIEKRLTDLQQSKAENNDKDWTSASYAEMIDHIITRFHNRHREQLPELITLAEKVENIHGDRDDCPIGVVAQLEKIYAELSQHLMKEEQILFPMIKMGNYAMASMPIRVMEMEHDEAGQDVEVIKSLTNNCTPPADACFSWKALYSGINEFIDDLMHHIHLENNILFPRVLNEK

SEQ ID NO: 11273 - protein, 353 aa, Haemophilus influenzae
MKKIGFFIMNIGSAGGTERVSINVANALAKQGYDVSFISIGGNKPFFQVDEKINIYAMNKLPYSLKKDYFSITKKLRELVKELQLDTLIVVDGAIMLFSALALVNLNIKHILWEHYSFNFTGNRLVRTLGKYLAVTTCDKIVTLTEAEKTLWQEKFKTNNIISIANPNTLLPKNKLAKLENKTILSVGHLFSYKGFDYLLKVWQVLAKKYPDWNLKIVGSGEEEENLKNLAKALDIEDSVNFIPRTNDVSFYYESSSIYCLPSQTEGLPLVVIEAMAFGLPIVAFNCSPGVKQLVEHKENGFLCEQNNIEEMVKGLDLLINNPELYLQMSDKSRLMSEDYGIEKIIEEWKGIL

SEQ ID NO: 11274 - protein, 491 aa, Haemophilus influenzae
MKYQAKNTALSQATDCIVLGVYENNKFSKSFNEIDQLTQGYLNDLVKSGELTGKLAQTVLLRDLQGLSAKRLLIVGCGKKGELTERQYKQIIQAVLKTLKETNTREVISYLTEIELKDRDLYWNIRFAIETIEHTNYQFDHFKSQKAETSVLESFIFNTDCAQAQQAISHANAISSGIKAARDIANMPPNICNPAYLAEQAKNLAENSTALSLKVVDEEEMAKLGMNAYLAVSKGSENRAYMSVLTFNNAPDKNAKPIVLVGKGLTFDAGGISLKPAADMDEMKYDMCGAASVFGTMKTIAQLNLPLNVIGVLAGCENLPDGNAYRPGDILTTMNGLTVEVLNTDAEGRLVLCDTLTYVERFEPELVIDVATLTGACVVALGQHNSGLVSTDNNLANALLQAATETTDKAWRLPLSEEYQEQLKSPFADLANIGGRWGGAITAGAFLSNFTKKYRWAHLDIAGTAWLQGANKGATGRPVSLLTQFLINQVK

SEQ ID NO: 11275 - protein, 575 aa, Haemophilus influenzae
MISGILASPGIAFGKALVLKEEKIVLDTQKITDDQIDAEVARFYEGRNAAVEQLNSIRERALISLGEEKAAIFEGHLMILEDEELEEEILDYLRSNKVNAGVAASKILDQQVTMLSEIDDEYLKERAGDIRDIANRLVKNILGMYIVDLGDIQEESILVAYDLTPSETAQLNLEKVLGVVTDIGGRTSHTSIMARSLELPAIVGTNKVTKLVNTGDYLILDAINNQVYINPTASQIDELKALEAKISEEKAELAKLKDLPAITLDGHKVDVVANIGTIRDCDGAERNGAEGIGLYRTEFLFMDREQLPTEEEQFIAYKQVVEAMNGRLTVIRTMDIGGDKELSYLDLPKEMNPFLGWRAIRIALDRREILNAQLRAVLRASAFGKLAVMFPMIISVEEIRELKAVIETLKAELREEGRLFDNNIQVGVMVETPSAAVNAKFLAKEVDFFSIGTNDLTQYTLAVDRGNEFISHLYNPMHPSVLGLIKQVIDASHAEGKWTGMCGELAGDERATLLLLGMGLDEFSMSAISVPRIKKLIRNVNFQDAKVLADTALQKPTAAEIDQLIEEFLLENSLN

SEQ ID NO: 11276 - protein, 85 aa, Haemophilus influenzae
MYSKDVEIIASNGLHTRPAAQFVKEAKAFSSEITVTSGGKSASAKSLFKLQTLALTQGTILTISADGEDEQQAVEHLVALIPTLE

SEQ ID NO: 11277 - protein, 781 aa, Haemophilus influenzae
MTSQHSAKKSSKNTPKNNRTFKGFLLKFSFTALVLTIFYGGYLDWQIRSKMDGQIWHLPAEVYSRLESVKIADNLAFDEVIQILLDNEYRQTTMVAAPGDFKLEDDSIVVLRRAFPFPDKAEPQRVLRLRFSHNKLSRIEDLVTVKTVDEFRLAPKLIAMLQSDNEDRLAIPLQNYPRLLIDTLILTEDRRFYEHNGINPVGILRALIANIRAGQTVQGGSTLTQQLVKNLFLSRERTITRKANEALMSLVLDWRYDKNRILETYLNEIYLGQNGDTQIHGFELASQFYFGRSIREISLDQIALLVGMVKGPSLYNPWRNPQNALERRNIVLRLMLEHKMIGDELYQLLSQRPLGVQKKGQISRKYPAFIQTLQADLRRKLGEHKISSLLGARIFSTMDLKQQAQAENAVGNTVSQLQLKMKNPHLEGAMIITDYRTGEIRAVVGGLQTQYAGFNRALMAKRQIGSLVKPSIYLTALSNPEQFRLNTPINNQPITINVKGSPPWQPRNYDKKYSDSVMLMDALARSLNIPTVNIGMKVGLSKVIDTQKAMGWDNVEIPKVPAMLLGSYTISPYDVTKLYQTLANQGGRIALTTVDSIADRQGNLIFQHDKSAKQVVPQEAAFQTLFAMQQTVERGTARSLQKDYADLHLAGKTGTTNESRDTWFVGIDGKNISTVWLGRDDNGETKLTGASGALQIYKDYLNRTNIEKLAITPPTTVKWVGINQYGDWDCESYRTIPIWLNNGQNFCGETSSPSLTPTTETETPPQESLWDVLDNPNPPAQ

SEQ ID NO: 11278 - protein, 257 aa, Haemophilus influenzae
MKYTLIKLGELLMKKIDLNADIAEGFPFDESLLQLLSSANVACGLHAGGAKEMQSAVKFAKENKVRIGAHPSFPDRENFGRTAMALSSQELIAHLRYQLGALKAICDGEGAVISYVKPHGALYNQAAKDEKIARLIAQTVYQFDPNLKLMGLAGSLMLRIAEEEKLQTISEVFADRHYMPDGSLVPRSQPNAMVESDKEAIQQVLQMVTKGQVNAIDGSLVPVKAESICLHGDNQHSLQFAKRIVEELEKNHIKITA

SEQ ID NO: 11279 - protein, 295 aa, Haemophilus influenzae
MRLVFLEILVGFVQRQIFAYTTQVFYANNIGKIMGFLTGKRILVTGLASNRSIAYGIAKSMKEQGAELAFTYLNDKLQPRVEEFAKEFGSDIVLPLDVATDESIQNCFAELSKRWDKFDGFIHAIAFAPGDQLDGDYVNAATREGYRIAHDISAYSFVAMAQAARPYLNPNAALLTLSYLGAERAIPNYNVMCLAKASLEAATRVMAADLGKEGIRVNAISAGPIRTLAASGIKNFKKMLSTFEKTAALRRTVTIEDVGNSAAFLCSDLASGITGEIVHVDAGFSITAMGELGEE

SEQ ID NO: 11280 - protein, 381 aa, Haemophilus influenzae
MIISSASDYREAARRRVPPFMFHYADGGSYAEQTLARNVSDLENIALRQRVLKDMSELDTSIELFGEKLSMPTILAPVGACGMYARRGEVQAAQAADNKGVPFTLSTVSICPIEEVAPAIKRPMWFQLYVLKDRGFMKNALERAKAAGCSTLVFTVDMPTPGARYRDMHSGMSGPYKEIRRVLQGFTHPFWAYDVGIKGKPHTLGNVSTYMGRQIGLDDYIGWLTENFDPSISWKDLEWIREFWEGPMVIKGILDPEDAKDAVRFGADGIVVSNHGGRQLDGVLSSARALPPIADAVKGDIKIIADSGIRNGLDIVRMLALGADATMLGRAFVYALGAEGRQGVENMLDIFKKEMHVAMTLTSNRTIADIKPEALVDLSKL

SEQ ID NO: 11281 - protein, 118 aa, Helicobacter pylori
MKFQPLGERVLVERLEEENKTSSGIIIPDNAKEKPLMGVVKAVSHKISEGCKCVKEGDVIAFGKYKGAEIVLDGTEYMVLELEDILGIVGSGSCCHTGNHDHKHAKEHEACCHDHKKH

SEQ ID NO: 11282 - protein, 426 aa, Helicobacter pylori
MSVTLVNNENNERYEFETIESTRGPKAVDFSKLFETTGFFSYDPGYSSTAGCQSKISYVNGKKGELYYRGHRIEDLVAKYKYVDVCKLLLTGELPKNQDESLEFELELRHRSFVHESLLNMFSAFPSNAHPMAKLSSGVSILSTLYSTHQNMHTEEDYQTMARRIVAKIPTLAAICYRNEVGAPIIYPDIARSYVENILFMLRGYPYSRLKHTTQGEVEITPLEVEAFDKILTLHADHSQNASSTTVRNVASTGVHPYAAISAGISALWGHLHGGANEKVLLQLEEIGDVKNVDKYIARVKDKNDNFKLMGFGHRVYKSYDPRAKILKGLKDELHQKGVKMDERLSEIAAKVEEIALKDEYFIERNLYPNVDFYSGTILRALKIPVRFFTPVFVIGRTVGWCAQLLEHVKSPQARITRPRQVYVGD

SEQ ID NO: 11283 - protein, 425 aa, Helicobacter pylori
MAYNPKILQKPKEGEEITIKDNKLHVPNHPIIPFIEGDGIGSDITPAMIKVVDSAVQKAYKGEKKIAWYEVFVGEKCYQKFKDYKELSPEEQWLLPDTIEAINHYKVSIKGPLTTPIGEGFRSLNVALRQKMDLYVCLRPVRWYGSPSPVKEPQKVDMVIFRENSEDIYAGIEWQEGSAEAKKLIHFLQNELKVKKIRFPESSGIGVKPISKEGTERLVRKAIEYAIDNDKPSVTFVHKGNIMKYTEGAFMKWGYALAQKEFNAQVIDKGPWCSLKNPKNGKEIIIKDMIADAFLQQILLRPSEYSVIATMNLNGDYISDALAAMVGGIGIAPGANLNDTVGMFEATHGTAPKYAGLDKVNPGSIILSAEMMLRHMGWVEAADLIVSAMEKAIKSKKVTYDFARLMDGAKEVKCSEFASVMIENM

SEQ ID NO: 11284 - protein, 97 aa, Helicobacter pylori
MDFSQLGGLLDGMKKEFSQLEEKNKDTIHTSKSGGGMVSVSFNGLGELVDLQIDDSLLEDKEAMQIYLMSALNDGYKAVEENRKNLAFNMLGNFAKL

SEQ ID NO: 11285 - protein, 199 aa, Helicobacter pylori
MVKIGVCGPVGSGKTALIEALTRHMSKDYDMAVITNDIYTKEDAEFMCKNSVMPRERIIGVETGGCPHTAIREDASMNLEAVEEMHGRFPNLELLLIESGGDNLSATFNPELADFTIFVIDVAEGDKIPRKGGPGITRSDLLVINKIDLAPYVGADLKVMERDSKKMRGEKPFIFTNIRAKEGLDDVIAWIKRNALLED

SEQ ID NO: 11286 - protein, 238 aa, Helicobacter pylori
MKLTPKELDKLMLHYAGELAKKRKEKGIKLNYVEAVALISAHIMEEARAGKKTAAELMQEGRTLLKPDDVMDGVASMIHEVGIEAMFPDGTKLVTVHTPIEANGKLVPGELFLKNEDITINEGKKAVSVKVKNVGDRPVQIGSHFHFFEVNRCLDFDREKTFGKRLDIASGTAVRFEPGEEKSVELIDIGGNRRIFGFNALVDRQADNESKKIALHRAKERGFHGAKSDDNYVKTIKE

SEQ ID NO: 11287 - protein, 352 aa, Helicobacter pylori
MSILAEKLSSILKRYDELTALLSSAEVVSDIKKLTELSKEQSSIEEISIASKEYLSVLENIKENKELLEDKELSELAKEELKILEIQKSDLETAIKQLLIPKDPNDDKNIYLELRAGTGGDEAGIFVGDLFKAYCRYADLKKWKVEIVSSSENSVGGYKEIIALIKGKGVYSRLKFEAGTHRVQRVPETESQGRIHTSAITVAIMPEVDDVEVSINPSDLKIEVFRAGGHGGQCVNTTDSAVRITHLPTNISVSMQDEKSQHKNKDKALKILKARLYEKQIEEQQLANAKDRKEQVGSGDRSERIRTYNYPQNRLSEHRINLTLYSLEEIMLSGNLDEVINPLIAHAQSQFE

SEQ ID NO: 11288 - protein, 129 aa, Helicobacter pylori
MRKIYATGKRKTAIAKVWLTPGKGELSINEQSLNQWLGGHEAIKMKVMQPLLLTKQEQSVDIKAVVFGGGYSAQAEALRHGISKALNAYDIAFRAILKPKGLLTRDSRVVERKKYGKRKARRSPQFSKR

SEQ ID NO: 11289 - protein, 141 aa, Helicobacter pylori
MTKTAKVNDIVRDWVVLDAKDKVFGRLITEIAVLLRGKHRPFYTPNVDCGDFVVVINANKVKFSGMKLEDKEYFTHSGYFGSTKSKTLQEMLEKAPEKLYHLAVRGMLPKTKLGKAMIKKLKVYRDDKHPHTAQTSKKDAK

SEQ ID NO: 11290 - protein, 309 aa, Helicobacter pylori
MQYALLFPGQGSQCVGMGKSFYESHTLAKELFERASNALKVDMKKTLFEENELLKESAYTQPAIYLVSYIAYQLLNKQVNGGLKPVFALGHSLGEVSAVSLSGALDFEKALKLTHQRGKMMQEACANKDASMMVVLGVSEESLLSLCQRTKNVWCANFNGGMQVVLAGIKDDLKALEPTLKEMGAKRVVFLEMSVASHCPFLEPMTFKFQELLEKSLKDKFHFEIISNATNEAYHNKAKAVELLSLQLTQPVRYQDCVKSNNDRVDVFFELGCGSVLKGLNKRLSNKPTISVGDNKGLDEAIEFLEEYV

SEQ ID NO: 11291 - protein, 380 aa, Helicobacter pylori
MRMQTKLIHGGISEDATTGAVSVPIYQTSTYRQDAIGRHKGYEYSRSGNPTRFALEELIADLEGGVKGFAFASGLAGIHAVFSLLQSGDHVLLGDDVYGGTFRLFNQVLVKNGLSCTIIDTSDISQIKKAIKPNTKALYLETPSNPLLKITDLAQCASVAKDHGLLTIVDNTFATPYYQNPLLLGADIVAHSGTKYLGGHSDVVAGLVTTNNEALAQEIAFFQNAIGGVLGPQDSWLLQRGIKTLGLRMEAHQKNALCVAEFLEKHPKVERVYYPGLPTHPNYELAKKQMRGFSGMLSFTLKNDSEAVAFVESLKLFILGESLGGVESLVGIPAFMTHACIPKTQREAAGIRDGLVRLSVGIEHEQDLLEDLEQAFAKIG

SEQ ID NO: 11292 - protein, 306 aa, Helicobacter pylori
MMIITTMQDAIGRTPVFKFTNKDYPIPLNSAIYAKLEHLNPGGSVKDRLGQYLIGEGFKTGKITSKTTIIEPTAGNTGIALALVAIKHHLKTIFVVPEKFSTEKQQIMRALGALVINTPTSEGISGAIKKSKELAESIPDSYLPLQFENPDNPAAYYHTLAPEIVQELGTNLTSFVAGIGSGGTFAGTARYLKERIPAIRLIGVEPEGSILNGGEPGPHEIEGIGVEFIPPFFENLDIDGFETISDEEGFSYTRKLAKKNGLLVGSSSGAAFVAALKEAQRLPEGSQVLTIFPDVADRYLSKGIYL

SEQ ID NO: 11293 - protein, 736 aa, Helicobacter pylori
MKHLIIVESPAKAKTIKNFLDKNYEVIASKGHVRDLSKFALGIKIDETGFTPNYVVDKDHKELVKQIIELSKKASITYIATDEDREGEAIGYHVACLIGGKLESYPRIVFHEITQNAILNALKTPRKIDMSKVNAQQARRFLDRIVGFKLSSLIASKITKGLSAGRVQSAALKLVIDKEREIKAFKPLTYFTLDAYFESHLEAQLISYKGNKLKAQELIDEKKAQEIKNELEKESYAISSIVKKSKKSPTPPPFMTSTLQQSASSLLGFSPTKTMSIAQKLYEGVATPQGVMGVITYMRTDSLNIAKEALEEARNKILKDYGKDYLPPKAKVYSSKNKNAQEAHEAIRPTSIILEPNALKDYLKPEELRLYTLIYKRFLASQMQDALFESQSVVVACEKGEFKASGRKLLFDGYYKILGNDDKDKLLPNLKENDPIKLEKLESNAHVTEPPARYSEASLIKVLESLGIGRPSTYAPTISLLQNRDYIKVEKKQISALESAFKVIEILEKHFEEIVDSKFSASLEEELDNIAQNKADYQQVLKDFYYPFMDKIEAGKKNIISQKVHEKTGQSCPKCGGELVKKNSRYGEFIACNNYPKCKYVKQTESANDEADQELCEKCGGEMVQKFSRNGAFLACNNYPECKNTKSLKNTPNAKETIEGVKCPECGGDIALKRSKKGSFYGCNNYPKCNFLSNHKPINKRCEKCHYLMSERIYRKKKAHECIKCKERVFLEEDNG

SEQ ID NO: 11294 - protein, 812 aa, Helicobacter pylori
MRYIKFFKELNNKNVNLVGGKNASIGEMFQELVPIGIKVPDGFAITSEAYWYLLEQGGAKQKIIELLENVDATEIDVLKIRSKQIRELIFGTPFPSDLRDEIFQAYEILSQQYHMKEADVAVRSSATAEDLPDASFAGQQDTYLNIKGKTELIHYIKSCLASLFTDRAISYRASRGFDHLKVALSVGVQKMVRADKGSAGVMFSIDTETGFKDAVFITSAWGLGENVVGGTINPDEFYVFKPTLEQNKRPIIKRQLGNKTQKMVYAPRGSEHPTRNIKTTKKEWQSFSLSDEDVLILAKYAIEIEKHYSKEAKQYRPMDIEWAKDGESGEIFIVQARPETVQSQKSKEESQVFEKFKFKNPNEKKEIILQGRAIGSKIGSGKVRIINDLEHMNSFKEGEILVTDNTDPDWEPCMKKASAVITNRGGRTCHAAIVAREIGVPAIVGVSGATDSLYTGMEITVSCAEGEEGYVYAGIYEHEIERVELSNMQETQTKIYINIGNPEKAFGFSQLPNHGVGLARMEMIILNQIKAHPLALVDLHHKKSVKEKNEIENLMAGYANPKDFFVKKIAEGIGMISAAFYPKPVIVRTSDFKSNEYMRMLGGSSYEPNEENPMLGYRGASRYYSESYNEAFSWECEALALVREEMGLTNMKVMIPFLRTIEEGKKVLEILRKNNLESGKNGLEIYIMCELPVNVILADDFLSLFDGFSIGSNDLTQLTLGVDRDSELVSHVFDERNEAMLKMFKKAIEACKRHNKYCGICGQAPSDYPEVTEFLVKEGITSISLNPDSVIPTWNAVAKLEKELKEHGLTEH

SEQ ID NO: 11295 - protein, 612 aa, Helicobacter pylori
MSAELIAVYKDEQIIDLESAKVLGLSDGIKALNGTEPIYFDDSPLALEVIRHSCAHLLAQSLKALYPDAKFFVGPVVEEGFYYDFKTSSKISEEDLPKIEAKMKEFAKLKLAITKETLTREQALERFKGDELKHAVMSKIGGDAFGVYQQGEFEDLCKGPHLPNTRFLNHFKLTKLAGAYLGGDENNEMLIRIYGIAFATKEGLKDYLFQIEEAKKRDHRKLGVELGLFSFDDEIGAGLPLWLPKGARLRKRIEDLLSQALLLRGYEPVKGPEILKSDVWKISGHYDNYKENMYFTTIDEQEYGIKPMNCVGHIKVYQSALHSYRDLPLRFYEYGVVHRHEKSGVLHGLLRVREFTQDDAHIFCSFEQIQSEVSAILDFTHKIMQAFDFSYEMELSTRPAKSIGDDKVWEKATNALKEALKEHRIDYKIDEGGGAFYGPKIDIKITDALKRKWQCGTIQVDMNLPERFKLAFTNEYNHAEQPVMIHRAILGSFERFIAILSEHFGGNFPFFVAPTQIALIPINEEHHVFALKLKEALKKRDIFVEVLDKNDSLNKKVRLAEKQKIPMILVLGNEEVETEILSIRDREKQDQYKMPLKEFLNMVESKMQEVSF

SEQ ID NO: 11296 - protein, 64 aa, Helicobacter pylori
MPKMKTNRGASKRFKVKKNLIKRGSAFKSHILTKKSPKRKANLNAPKHVHHTNAHSVMSLLCRA

SEQ ID NO: 11297 - protein, 116 aa, Helicobacter pylori
MRVKTGVVRRRRHKKVLKLARGFYSGRRKHFRKAKEQLERSMYYAFRDRKQKKREFRSLWVVRINAACRMHNTSYSRFMHALKVANIELDRKVLADMAMNDMQAFTSVLESVKEHL

SEQ ID NO: 11298 - protein, 426 aa, Helicobacter pylori
MLTIKDIHALEVMDSRGNPTIQASVVLSDNTKASAIVPSGASTGKREALELRDNDKTRFLGKGVLRACENVNSVIKHHLIGLEAINQAFVDERLRALDGTPNYANLGANAVLGVSMALARASAKALNLPLYRYLGGANALTLPVPMLNIINGGTHANNSIDFQEYMIMPLGFESFKEALRASAEVYHTLKKLLDGKNQLTSVGDEGGFAPNFSNNVEPLEVISQAIEKAGYKLGEEIALALDVASSELVDENFNYHLKGENKILDSHELVAYYKELVAKYPIVSIEDGLSEDDWEGWAFLSKELGRQIQLVGDDLFVTNASLLQKGIEKNIANAVLIKPNQIGTISETLETIRLAKHHAYQCVMSHRSGESEDSFIADFAVALNTGEIKTGSTARSERIAKYNRLLEIEHELKGGIYIGKELFKHG

SEQ ID NO: 11299 - protein, 253 aa, Helicobacter pylori
MTQEELDALMNGGDLENLEALETKEETKEEAKEEAKEEAKEEAKEKEEIKEESSSQKMTVKKEDAEKYGKISPNEWPPPPPTEEHKVVHQLDDVTRDSEVKATQIFDQLDLIGASAEKIAKMVKKIQEPLQKHQEIFDNLHGHFPHVESFKTALNEQQEILNALKSIEEEAANCSDSSMQAMDIMQFQDIHRQKIERVVNVMRALSQYMNSLFEGKIDDSKRVSSATFITGDDDKDLASADDIEALIASFGAK

SEQ ID NO: 11300 - protein, 501 aa, Helicobacter pylori
MFSNQYIQQRIHKANSLREEGKNPYQNGLKRSLTNAAFLEKYAYVKGLEEPKDKEKCESIVGRVKLLRLMGKACFIKVEDESTILQVYVSQNELNDEFKSLKKHLEVGDIVLVKGFPFATKTGELSIHALEFHILSKTIVPLPEKFHGLSDIELRYRQRYLDLIVNPSVKDVFKKRSLIVSSVRKFFEMEGFLEVETPMMHPIPGGANARPFITYHNALEVERYLRIAPELYLKRLIVGGFEAVFEINRNFRNEGMDHSHNPEFTMIEFYWAYHTYEDLIELSKRLFDYLLKTLNLDSKIIYNDMEVDFNQTSVISYLDALETIGGISKDILEKEDRLLAYLLEQGIKVEPNLTYGKLLAEAFDHFVEHQLINPTFVTQYPIEISPLARRNDSNPNIADRFELFIAGKEIANGFSELNDPLDQLERFKNQVAEKEKGDEEAQYMDEDYVWALAHGMPPTAGQGIGIDRLVMLLTGAKSIKDVILFPAMRPVKNDFNVESEE

SEQ ID NO: 11301 - protein, 416 aa, Helicobacter pylori
MAYFLEQTDSEIFELIFEEYKRQNEHLEMIASENYTFASVMEAMGSVLTNKYAEGYPNKRYYGGCEVVDKIESLAIERAKKLFNCQFANVQAHSGSQANNAVYHALLKPYDKILGMDLSCGGHLTHGAKVSLTGKHYQSFSYGVNLDGYIDYEEALKIAQSVKPEIIVCGFSAYPREIDFKKFREIADEVGALLLGDIAHVAGLVVTGEHAHPFPHCHVVSSTTHKTLRGPRGGIILTNDEEIAAKIDKAIFPGTQGGPLMHVIAAKAVGFKENLKPEFKAYAQLVKSNMQVLAKALKEKNHKLVSGGTSNHLLLMDFLDKPYSGKDADIALGNAGITVNKNTIPGETRSPFVTSGIRIGSAALSARGMGAKEFEIIGNKISDILNDINNVSLQLHVKEELKAMVNQFPVYHQPIF

SEQ ID NO: 11302 - protein, 275 aa, Helicobacter pylori
MGFLKGKKGLIVGVANNKSIAYGIAQSCFNQGATLAFTYLNESLEKRVRPIAQELNSPYVYELDVSKEEHFKSLYNSVKKDLGSLDFIVHSVAFAPKEALEGSLLETSKSAFNTAMEISVYSLIELTNTLKPLLNNGASVLTLSYLGSTKYMAHYNVMGLAKAALESAVRYLAVDLGKHHIRVNALSAGPIRTLASSGIADFRMILKWNEINAPLRKNVSLEEVGNAGMYLLSSLSSGVSGEVHFVDAGYHVMGMGAVEEKDNKATLLWDLHKEQ

SEQ ID NO: 11303 - protein, 621 aa, Helicobacter pylori
MVKESDILVVGGGHAGIEASLIAAKMGARVHLITMLIDTIGLASCNPAIGGLGKGHLTKEVDVLGGAMGIITDHSGLQYRVLNASKGPAVRGTRAQIDMDTYRILARNLVLNTPNLSVSQEMTESLILENDEVVGVTTNINNTYRAKKVIITTGTFLKGVVHIGEHQNQNGRFGENASNSLALNLRELGFKVDRLKTGTCPRVAGNSIDFEGLEEHFGDTNPPYFSYKTKDFNPTQLSCFITYTNPITHQIIRDNFHRAPLFSGQIEGIGPRYCPSIEDKINRFSEKERHQLFLEPQTIHKSEYYINGLSTSLPLDVQEKVIHSIKGLENALITRYGYAIEYDFIQPTELTHTLETKKIKGLYLAGQINGTTGYEEAAAQGLMAGINAVLALKNQAPFILKRNEAYIGVLIDDLITKGTNEPYRMFTSRAEYRLLLREDNTLFRLGEHAYRLGLMEEDFYKELKKDKQEIQDNLKRLKEYILTPSKEVLKRLDELDENPINDKVDGVSLLARDSFNAEKMRSFFSFLAPLNERVLEQIKIECKYNIYIEKQHENIAKMDSMLKVSIPKGFVFKGIPGLSLEAVEKLEKFRPKSLFEASEISGITPANLDVLHLYIHLRKNS

SEQ ID NO: 11304 - protein, 456 aa, Helicobacter pylori
MILKKSGILAKKTSLFECQHCGFTSPKWLGKCVQCNAWESFIELNQAQKEVLNTLKKPIPQAQKSVSIAAIEHEEVIKFSSTQSELDIVLGGGIAKGGLYLVGGSPGVGKSTLLLKVASGLAKNQQKVLYVSGEESLSQIKMRAIRLDCIEKELYLLNEINWPVIKANIESENYFACVIDSIQTLYSPEISSAPGSISQVREITFELMRLAKTRDIAIFIIGHITKEGSIAGPRVLEHMVDSVLYFEGDPSRELRILRSFKNRFGPTSEIGLFEMKEQGLVSAKEASSLFFSKEEPMEGSAITITLEGSRALILEIQALVSECSFGSPKRLANGFDTNRLNMLIALLEKKLEIPLNRHDVFINVSGGIKISEPACDLAVIASILSSFKNRKIDNKTAFLGEVSLNGRILEAPNLNARLKEMENYGFLKAILPKKPSQKTSIKCYEANAVGKIVEWM

SEQ ID NO: 11305 - protein, 577 aa, Helicobacter pylori
MLFSKLFAPTLKEPPKDAVLKSHKHLAQAGYIYQVGSGIYNFLPLAKKVLDKIENITHKRMQEHGAQNILMSFVVLASLWEKSGRLDKYGKELLVFKDRKDNDFVLSPTLEENITEIAANFIKSYKQLPVHLYQIHTKFRDEIRPRFGLVRAREFIMKDGYSFHEDAESLDKEFLNTQSAYKEILSDLGLDFRIVEADSGAIGGSKSREFVVLTECGEDTIVVCQNCDYAANIEIAKRSKRPEPLNVPKAQLAKFPTPNTTSAQSVAEFFKTEPYFVLKALVRKVIHKDKETLACFFVRGDDNLEEVKALNALNIIGANALELREASQKDLDNVGLIAGFIGPYGLKKHVSYIIFDEDLKEGDCLIAGANEKDFHAVGVDLKGFENLVYADIVQVKESDRCPNCQGALKYHKSLEVGHIFKLGQGYAKSLKASFLDKNGKEQFFEMGCYGIGISRLLSAILEQKSDDLGCVWTKNTAPFDVVIVVSNWKDEAQKKLAFEVYERLLQKGVDALLDDRDARFGAKMRDFELIGERLALIIGKQTLESKEFECIKRANLEKQTIKDIELEEKILEMLESE

SEQ ID NO: 11306 - protein, 307 aa, Helicobacter pylori
MQEKQLKTIQNKIASWIKEIESAFIDELFSKIGPSKMLRSKLMLALLNEKTDAILLDKAFNLCAIVEMIQTASLLHDDVIDKAAMRRKLPSINALFGNFNAVMLGDVFYSKAFFELSKMGESIAKSLSNAVLRLSRGEIEDVFVGGSFNSDKQKYWRILEDKTAHFIEASLKSMAILLNKDAKMYADFGLNFGMAFQIIDDLLDITQDAKTLGKPNFSDFKEGKTTLPYLLLYEKLNQRDQGLLISYFKQDSHEIIEWTKEKFKQYGTIEETLKIAQVYSKKALEAIKGENNLILEKLAQDVIYRTF

SEQ ID NO: 11307 - protein, 144 aa, Helicobacter pylori
MKTFEILKHLQADAIVLFMKVHNFHWNVKGTDFFNVHKATEEIYEEFADMFDDLAERIVQLGHHPLVTLSEAIKLTRVKEETKTSFHSKDIFKEILEDYKYLEKEFKELSNTAEKEGDKVTVTYADDQLAKLQKSIWMLQAHLA

SEQ ID NO: 11308 - protein, 492 aa, Helicobacter pylori
MELNQPPLPTEIDGDAYHKPSFNDLGLKESVLKSVYEAGFTSPSPIQEKAIPAVLQGRDVIAQAQTGTGKTAAFALPIINNLKNNHTIEALVITPTRELAMQISDEIFKLGKHTRTKTVCVYGGQSVKKQCEFIKKNPQVMIATPGRLLDHLKNERIHKFVPKVVVLDESDEMLDMGFLDDIEEIFDYLPSEAQILLFSATMPEPIKRLADKILENPIKIHIAPSNITNTDITQRFYVINEHERAEAIMRLLDTQAPKKSIVFTRTKKEADELHQFLASKNYKSTALHGDMDQRDRRSSIMAFKKNDADVLVATDVASRGLDISGVSHVFNYHLPLNTESYIHRIGRTGRAGKKGMAITLVTPLEYKELLRMQKEIDSEIELFEIPTINENQIIKTLHDAKVSEGIISLYEQLTEIFEPSQLVLKLLSLQFETSKIGLNQQEIDAIQNPKEKTPKPSNKKTPQHERARSFKKGQHRDRHPKTNHYSKKPKRR

SEQ ID NO: 11309 - protein, 516 aa, Helicobacter pylori
MLEIKNLNCVLNAHFSLQNINISLNPSERVAIVGESGSGKSSIANIIMRLNPRFKPHNGEVLFETTNLLKESEEFMQHLRGNAIAYIAQDPLSSLNPLHKIGKQMSEAYFLHYKNASKTLLKEQVLNAMKQVQLDEKFLDRYPYELSGGQRQRVCIAMGIINAPKLLICDEPTTALDAQIQNQILDLPKQLSAEKNIALLFISHDLKAVKRLADRVYVLKKGEIVETNLTKDLFNDPKHEYSKLLIQASNLPAKNLKALDETLLEVKDFSVYYLQKRFFRPSLKKPLIASVNFSLKAKENIGIIGESGSGKSSLALGLLKLALNSGEEKILGQSVGSLNSKAFKPYRKILQMVFQDPYASLNPRLSIQSILTEALRFAYPKASKEEWHHLAKLCLEEVCLSHELLNSYAYELSGGERQRVAIARAIALKPKIILLDEPTSALDKSIQKSVLELLLDLQEKQDLSYLFISHDLDVIKAFCDKVLVISEGKVVEMNTIKEVFDNPKHAYTKRLLESRL

SEQ ID NO: 11310 - protein, 856 aa, Helicobacter pylori
MNLFEKMTDQLHETLDSALALALHHKNAEVTPMHMLFAMLNNSQGILIQALQKMPVDIQALRLSVQSELNKFAKVSQISKQNIQLNQALIQSLENAQGLMAKRGDSFIATDVYLLANMGLFESVLKPYLDAKELQKTLESLRKGRTIQDKNDDSNLESLEKFGIDLTQKALENKLDPVIGRDEEIIRMMQILIRKTKNNPILLGEPGVGKTAVVEGLAQRIMNKEVPKTLLNKRVIALDLSLLVAGAKYRGEFEERLKKVIEEVKKSANVILFIDEIHTIVGAGASEGGMDAANILKPALARGELHTIGATTLKEYRKYFEKDMALQRRFQPILLNEPSINEALQILRGLKETLETHHNITINDSALIASAKLSSRYITDRFLPDKAIDLIDEGAAQLKMQMESEPAKLSSVKRSIQRLEMEKQALEMEKKESNAKRMQEILKELSDLKEEKIQLEAQFENEKEVFKEISRLKMEMESLKKEAERFKRNGDYQQAGEIEYSKIPENKKKEEELQRKWEAMQQNGALLQNALTENNIAEIVSQWTHIPVQKMLQSEKNRVLNIESELQKRVVGQEKAIKAIAKAIKRNKAGLSDSNKPIGSFLFLGPTGVGKTESAKALAQFLFDSDKNLIRIDMSEYLEKHAMSRLIGAAPGYVGYEEGGQLTEAVRRKPYSVVLLDEVEKAHPDVFNLLLQVLDEGHLTDSKGVRVDFKNTILILTSNVASGALLEENLSEAEKQKAIKESLRQFFKPEFLNRLDEIISFNALDSHAVINIVGILFENIQKKALERGINITLDEEAKELIAEAGFDRFYGARPLKRALYEMVEDKLAELILEDKVKENDSVAFVVENNEIVPKIK

SEQ ID NO: 11311 - protein, 371 aa, Helicobacter pylori
MDFQLQATDNNARAGLLNLAHSQVATPVFMPVGTQGCIKSLDATDAQEILGAKLILANTYHMYLRPGEKVVEELGGLHRFAQFYGSFLTDSGGFQAFSLSDNVKLQEDGIVFKSHIDGSKHLFTPAKVLDIQYSLNSDIMMVLDDLVGLPAPLKRLEESIKRSAKWANMSLEYHKEKNRPSNNLFAIIQGGTHLKMRSLSVGLTHEGFDGYAIGGLAVGESADEMLETIAHTAPLLPKDKPRYLMGVGTPENILDAISLGVDMFDCVMPTRNARNATLFTHSGKISIKNAPYKLDNTPIEENCACYACKRYSKAYLHHLFRAKELTYARLASLHNLHFYLELVKNARNAILEKRFLSFKKEFLEKYNSRSH

SEQ ID NO: 11312 - protein, 104 aa, Helicobacter pylori
MSYAIFKHGGKQYKVVEGDIVLLDKMDKEPKALVELVEVLAVSKEGKLSCGKPFVNGAKIEAEVINEGRGKKVITFKKRRRKDSKTKRGFRRDFTRVRITKIVA

SEQ ID NO: 11313 - protein, 549 aa, Helicobacter pylori
MNNVFVKGLFFFLLLFGFFLKASESPNATLNPSKENVSVEEQKRFGGVLVFARGADGSSMDPALVTDGESYVATGNIYDTLVQFRYGTTEVEPALATSWDISPDGLVYTFHLRKGVYFHQTKYWNKKVEFSAKDVLFSFERQMDKAKRYYSPGAKSYKYWEGMGMSHIIKSIEALDDYTIRFTLNGPEAPFLANLGMDFLSILSKDYADYLAQNNKKDELAKKPIGTGPFKFFLWNKDEKIILLKNQDYWGPKAYLDKVVVRTIPNSSTRALALRTGEIMLMTGPNLNEVEQLEKVPNIVVDKSAGLLASWLSLNTQKKYFDNPLVRLAINHAINADDYIKVLYEGFAQKMVNPFPPTIWGYNYNIKPYEYDLKKAKELLKQAGYPNGFKTTIFTTATRNPKGAVFIQASLAKIGIDVKIEVYEWGAYLKRTGLGEHEMAFSGWMADIADPDNFLYTLWSEQAASAIPTQNHSFYKNKEFSNLLIKAKRVSDQKEREALYLKAQEIIHKDAPYVPLAYPYSVVPHLSKVKGYKTTGVSVNRFFKVYLEK

SEQ ID NO: 11314 - protein, 268 aa, Helicobacter pylori
MKLLEIKELKKSYAIDRGLFKPKRVIHALNGISFEVEQNEVLSIVGESGCGKSTTAKILAGIERQDSGAIYFNGKRHLHFSKQDWFDYRKKVQMIFQDPYSSLNPRWKVGEIIAEPLLLNSHFSKKEIKTKVLEIMQKVGLKLEWIDRYPHQFSGGQRQRIGIARALILHPSVVICDEPVSALDVSIQAQVLNLLLDLQKEMGLTYIFISHDLGVVEHISDKIIVMNQGQIVETGDVDSVISAPKHPYTQKLLNAVPHLEKSMQRFAK

SEQ ID NO: 11315 - protein, 430 aa, Helicobacter pylori
MELLHSINDFNEAKQVIAGGVNSPVRAFKSVKGTPPFILKGKGAYLYDVDNNHYIDFVQSWGPLIFGHADEEIEENIINALKKGTSFGAPTELETTLAKEIISCYEGLDKVRLVSSGTEATMSAIRLARAYSQKDDLIKFEGCYHGHSDSLLVKAGSGCATFGSPSSLGVPNDFSKHTLVARYNDLNSTEECFKKGNVGCVIIEPIAGNMGLVPAQKEFLLGLKALCEKYQAVLILDEVMSGFRASLSGSQEFYGVVPDLVTFGKVIGAGLPLACFGGRAEIMDLLSPIGSVYQAGTLSGNPLAVCAGLSALYKIKRDKTLYTRLDALAIRLTQGLQKSAQNYNIALETLNMGSMFGFFFNENAVHDFDDALKSDTEMFAKFHQKMLFKGVYLACSSFETGFICEPMTEEMIDLTIAKADESFDEIIKGV

SEQ ID NO: 11316 - protein, 541 aa, Helicobacter pylori
MHTLIKGILEEILEEEVIVEYPKDREHGHYATPIAFNLAKVFKKSPLAIAEELALKISTHEKTQGLFDSVVACKGYINFTLSLDFLERFTQKALELKEKFGSQVKSERSQKIFLEFVSANPTGPLHIGHARGAVFGDSLAKIARFLGHEVLCEYYVNDMGSQIRLLGLSVWLAYREHVLKESVTYPEVFYKGEYIIEIAKKANNDLEPSLLKENEETIIEVLSGYARDLMLLEIKDNLDALGIHFDSYASEKEVFKHKDAVFEQLEKANALYEKDSKIWLKSSLYQDESDRVLIKEDKSYTYLAGDIVYHDEKFKQDYTKYINIWGADHHGYIARVKASLEFLGYDSNKLEVLLAQMVRLLKDNEPYKMSKRAGNFILIKDVVDDVGKDALRFIFLSKRLDTHLEFDVNTLKKQDSSNPIYYIHYANSRIHTMLEKSPFSKEEVLQTPLTNLNAEEKYLLFSALSLPKAIESSFEEYGLQKMCEYAKTLASEFHRFYNAGKILDTPKAKELLKICLIVSLSLSNAFKLLGIEIKTKISARD

SEQ ID NO: 11317 - protein, 505 aa, Helicobacter pylori
MKMILFNQNPMITKLLESVSKKLELPIENFNHYQELSARLKENQEWLLIADDECLEKLDQVDWLELKETISQNKNSVCMYKKGNEAQPFLEGFEVKIKKPFLPTEMLKVLQKKLGSNASELEPSQNLDPTQEVLETNWDELENLGDLEALVQEEPNNEEQLLPTLNDQEEKEEVKEEEKEEVKEEEKEEVKEEEKEEVKETPQEEKKPKDDETQEGETLKDKEVSKELEAPQELEIPKEETQEQDPIKEETQENKEEKQEKTQDSPSAQELEAMQELVKEIQENSNGQENKEKTQESAEIPQDKEIQEVVTEKTQAQELEVPKEKTQESAEALQETQAHELEKQEIAETPQDVEIPQSQDKEVQELEIPKEETQENTETPQDVETPQEKETQEDHYESIEDIPEPVMAKAMGEELPFLNEAVAKIPNNENDTETPKESVTETSKNENNTETPQEKEESDKTSSPLELRLNLQDLLKSLNQESLKSLLENKTLSIKITLEDKKPNA

SEQ ID NO: 11318 - protein, 260 aa, Helicobacter pylori
MQKDYQKLIVYLCDFLEKEVQKRGFKKVVYGLSGGLDSAVVGVLCQKVFKENAHALLMPSSVSMPENKTDALNLCEKFSIPYTEYSIAPYDAIFSSHFKDASLTRKGNFCARLRMAFLYDYSLKSDSLVIGTSNKSERMLGYGTLFGDLACAINPIGELFKTEVYELARRLNIPKKILNKPPSADLFVGQSDEKDLGYPYSVIDPLLKDIEALFQTKPIDTETLAQLGYDEILVKNITSRIQKNAFKLELPAIAKRFNPE

SEQ ID NO: 11319 - protein, 330 aa, Helicobacter pylori
MALPVYYDKDIDLGVIQSLQVGIIGYGAQGEAQALNLRDSKVKARIGLYQGSLSVSKAKKEGFEVLEVKELVQNSDVIMALLPDELHKEVLEKEVIPFLKEGQIVGFAHGFSVHFNQVVLPKGVGAILVAPKGPGSALREEYLKNRGLYHLIAIEQESSIHNAKAVALSYAKAMGGGRMGVLETSFKEECESDLFGEQAVLCGGLEAIVRMGFETLIKAGYPEELAYFECVHEVKLVADLLHYKGVEGLRKHISNTAEFGAIKAREPMGKLLKKRMQKILKKIQNGSFAKDFLLEKSLNYPRLNTERKALKETKIEQIGEILRAPFNHKK

SEQ ID NO: 11320 - protein, 538 aa, Helicobacter pylori
MDRAKFIFVTGGVLSSLGKGISSSSIATLLQHCNYQVSILKIDPYINIDPGTMSPLEHGEVFVTSDGAETDLDIGHYERFLNRNLTRLNNFTTGQIFSSVIENERKGEYLGKTIQIVPHVTDEIKRRIKSAAKGLDFLIVEVGGTVGDMEGMFYLEAIRQLKLELGNEKVINVHVTLIPYIQTTNELKTKPTQHSVQELRRLGVTPQIILARSPKPLDKELKNKIALSCDVEQDSVIVATDTKSIYACPILFLQEGILTPIARRFNLNKLHPKMAAWNTLVEKIIAPKHKVKIGFVGKYLSLKESYKSLIEALIHAGAHLDTQVNIEWLDSENFNEKTDLEGVDAILVPGGFGERGIEGKICAIQRARLEKLPFLGICLGMQLAIVEFCRNVLGLKGANSTEFNQRCEYPVVYLIGDFMDQNHQKQVRTYNSPLGGTMRLGEYECEIMPNSLLEKAYKKPSIKERHRHRYEINPKYRQEWENKGLKVVGFGSNHLIEAIELEDHPFFVGVQFHPEFTSRLQSPNPIILDFIKSALSKS

SEQ ID NO: 11321 - protein, 458 aa, Helicobacter pylori
MNKVNKENKKVEKKELSRILIANRGEIALRAIQTIQEMGKESIAIYSIADKDAHYLNTASAKVCIGGAKSSESYLNIPAIISAAELFEADAIFPGYGFLSENQNFVEICSHHSLEFIGPSAKVMALMSDKSKAKSVMKEAGMPVIEGSDGLLKSYQEAEEIADKIGYPVIIKAAAGGGGRGMRVVGDKSKLKNLYLAAETEALSAFGDGSVYLEKFINKPKHIEVQILADKHGNVIHVGERDCSVQRRQQKLIEETPAVVLEEGVRERLLETAIKAAKYIGYVGAGTFEFLLDSNMKDFYFMEMNTRLQVEHTISEMVSGLNLIEWMIKIAQGEKLPKQESFSLKGHAIECRITAEDPKKFYPSPGKITEWIAPGGVNVRLDSHAHANYVVPTHYDSMIGKLIVWGENRERAIAKMKRALKEFKVEGIKTTIPFHLEMLENADFRQAKIHTKYLEENF

SEQ ID NO: 11322 - protein, 156 aa, Helicobacter pylori
MNLSEIEELIKEFKASDLGHLKLKHEHFELVLDKESAYAKKSALNPAHSPAPIMVEASMPSVQTPVPMVCTPIVDKKEDFVLSPMVGTFYHAPSPGAEPYVKAGDTLKKGQIVGIVEAMKIMNEIEVEYPCKVVSVEVGDAQPVEYGTKLIKVEKL

SEQ ID NO: 11323 - protein, 222 aa, Helicobacter pylori
MLDYRQKIDALITKIEKARTAYSRHHIVKIVAVSKNASPEAIQHYYNCSQRAFGENKVQDLKTKMHSLEHLPLEWHMIGSLQENKINALLSLKPALLHSLDSLKLALKIEKRCEILGVNLNALLQVNSAYEESKSGVVPEEALEIYSQISETCKHLKLKGLMCIGAHTDDEKEIEKSFITTKKLFDQIKNASVLSMGMSDDFELAIACGANLLRIGSFLFKE

SEQ ID NO: 11324 - protein, 328 aa, Helicobacter pylori
MHTLIERLEKVTNSKELEEARLNALGKKGVFADKFNQLKHLNGEEKNAFAKEIHHYKQAFEKAFEWKKKAIIELELEERLKKEKIDVSLFNAIKTSSSHPLNYTKNKIIEFFTPLGYKLEIGSLVEDDFHNFSALNLPPYHPARDMQDTFYFKDHKLLRTHTSPVQIHTMQEQTPPIKMICLGETFRRDYDLTHTPMFHQIEGLVVDQKGNIRFTHLKGVIEDFLHYFFGGVKLRWRSSFFPFTEPSAEVDISCVFCKQEGCRVCSHTGWLEVLGCGMVNNAVFEAIGYENVSGFAFGMGIERLAMLTCQINDLRSFFETDLRVLESF

SEQ ID NO: 11325 - protein, 463 aa, Helicobacter pylori
MSLIVTRFAPSPTGYLHIGGLRTAIFNYLFARANQGKFFLRIEDTDLSRNSIEAANAIIEAFKWVGLEYDGEILYQSKRFEIYKEYIQKLLDEDKAYYCYMSKEELDALREEQKARKETPRYDNRYRDFKGTPPKGIEPVVRIKVPQNEVIGFNDGVKGEVKVNTNELDDFIIARSDGTPTYNFVVTIDDALMGITDVIRGDDHLSNTPKQIVLYKALNFKIPNFFHVPMILNEEGQKLSKRHGATNVMDYQEMGYLKEALVNFLARLGWSYQDKEVFSMQELLELFDPKDLNSSPSCFSWHKLNWLNAHYLKNQSVQELLKLLKPFSFSDLSHLNPTQLDRLLDALKERSQTLKELALKIDEVLIAPVEYEEKVFKKLNQALVMPLLEKFKLELNKANFNDESALENAMRQIIEEEKIKAGSFMQPLRLALLGKGGGIGLKEALFILGKTESVKRIEDFLKN

SEQ ID NO: 11326 - protein, 599 aa, Helicobacter pylori
MKNIRNIAVIAHVDHGKTTLVDGLLSQSGTFSEREKVDERVMDSNDLERERGITILSKNTAIYYKDTKINIIDTPGHADFGGEVERVLKMVDGVLLLVDAQEGVMPQTKFVVKKALSFGICPIVVVNKIDKPAAEPDRVVDEVFDLFVAMGASDKQLDFPVVYAAARDGYAMKSLDDEKKNLEPLFETILEHVPSPSGSVDEPLQMQIFTLDYDNYVGKIGIARVFNGSVKKNESVLLMKSDGSKENGRITKLIGFLGLARTEIENAYAGDIVAIAGFNAMDVGDSVVDPANPMPLDPMHLEEPTMSVYFAVNDSPLAGLEGKHVTANKLKDRLLKEMQTNIAMKCEEMGEGKFKVSGRGELQITILAENLRREGFEFSISRPEVIIKEENGVKCEPFEHLVIDTPQDFSGAIIERLGKRKAEMKAMNPMSDGYTRLEFEIPARGLIGYRSEFLTDTKGEGVMNHSFLEFRPFSGSVESRKNGALISMENGEATAFSLFNIQERGTLFINPQTKVYVGMVIGEHSRDNDLDVNPIKSKHLTNMRASGSDDAIKLTPPRTMVLERALEWIEEDEILEVTPLNLRIRKKILDPNMRKRAKK

SEQ ID NO: 11327 - protein, 62 aa, Helicobacter pylori
MAKRCALTFKGPMIGNHVSHANNKNKRRLLPNLRSIKIQLDDGTTKRIKVAASTLRTMRKGA

SEQ ID NO: 11328 - protein, 353 aa, Helicobacter pylori
MLYSLLYGYFNINLFQYLTFRAGLGFFIAFFLTLFLMPKFILWAKAKKANQPISSFVPSHQNKKDTPTMGGIVFVFATIVASVLCASLGNLYVLLGLIVLVGFSFVGFRDDYTKINQQSNAGMSAKMKFGMLFILSLIVSVLLSLKGLDTFLYAPFLKNPLFEMPTMLAVGFWVLVFLSTSNAVNLTDGLDGLASVPSIFTLLSLSIFVYVAGNAEFSKYLLYPKVIDVGELFVVSLALVGSLFGFLWYNCNPASVFMGDSGSLALGGFIAYNAIVSHNEILLVLMGSIFVIETLSVILQVGSYKTRKKRLFLMAPIHHHFEQKGWAENKVIVRFWIISMLSNLVALLSLKVR

SEQ ID NO: 11329 - protein, 422 aa, Helicobacter pylori
MKISLLGHGKTTLALGRFFKKNHNEVKFFDDKFLSSFKDSEGFLCYPSKDFNPNDSQLEIVSPGISFTHPLVIKAKHLVSEYDYINSLFDLVFTPTIISISGTNGKTTTTEMLTMLLEDFKAVSGGNIGTPLIELFEKRSPLWVLETSSFSLHYTNKAYPLIYLLINIEADHLTWHCNFENYLNAKLKVLTLMPKTSLAILPLKFKEHPIIQNSQAQKIFFDKSEEVLERLKIPSNALFFKGAFLLDAALALLVYEQFLKIKNLKWQDYRENALKRLNAFKIGSHKMEEFRDKQGRLWVDDSKATNIDATLQALKTFKNQKIHLILGGDIKGVNLTPLFEEFKNYKISLYAIGSSAFIIQALALEFNVSCQVCLELEKAVQEIKSVLSQNEIALLSPSAASLDQFSSYKERGEKFKAFVLKD

SEQ ID NO: 11330 - protein, 773 aa, Helicobacter pylori
MQNYQSHSIKVLKGLEGVRKRPGMYIGDTNVGGLHHMVYEVVDNAVDESMAGFCDTINITLTDEGSCIVEDNGRGIPVDIHPTEKIPACTVVLTILHAGGKFDNDTYKVSGGLHGVGVSVVNALSKRLIMTIKKEGQIYRQEFEKGIPTSELEIIGKTKSAKESGTTIEFFPDESVMEVVEFQAGILQKRFKEMAYLNDGLKISFKEEKTQLQETYFYEDGLKQFVKDSAKKELLTPIISFKSMDEETRTSIEVALAYADDYNENTLSFVNNIKTSEGGTHEAGFKMGLSKAILQYIGNNIKTKESRPISEDIKEGLIAVVSLKMSEPLFEGQTKSKLGSSYARALVSKLVYDKIHQFLEENPNEAKIIANKALLAAKAREASKKARELTRKKDNLSVGTLPGKLADCQSKDPLESEIFLVEGDSAGGSAKQGRDRVFQAILPLKGKILNVEKSHLSKILKSEEIKNMITAFGCGIQESFDIERLRYHKIIIMTDADVDGSHIQTLLMTFFYRYLRPLIEQGHVYIAQAPLYKYKKGKTEIYLKDSVALDHFLIEHGINSVDIEGIGKNDLMNLLKVARHYRYALLELEKRYNLLEILRFLIETKDALSLDMKVLEKSILEKLEGLNYQILRSFATEESLHLHTQTPKGLVEFNLDDNLFKEVLFEEANYTYQKLMEYNLDFLENKDILAFLEEVENHAKKGANIQRYKGLGEMNPNDLWETTMHKENRSLIKLKIEDLEKTDAVFSLCMGDEVEPRRAFIQAHAKDVKQLDV

SEQ ID NO: 11331 - protein, 254 aa, Helicobacter pylori
MKIGVYGASGRIGKLLLEELKGGYKGLALSSVFVRQKCETDFSSFSHAPLVTNDLKAFVRACECVIDFSLPKGVDNLLEALLECPKILVSGTTGLEKETLEKMQQLALKAPLLHAHNMSIGIMMLNQLAFLTSLKLKDADIEIIETHHNLKKDIPSGTALSLYETCAKARGYDEKNALITHREGLRSKESIGIAALRGGDVAGKHTIGFYLEGEYIELSHTATNRSIFAKGALEVALWLKDKAAKKYEINEMFG

SEQ ID NO: 11332 - protein, 150 aa, Helicobacter pylori
MMKVLLLEDVKNLGKAGEVCEVKDGYGNNFLIANQKAKLATNEVINKYKAEVKKKAEKEALEKAQKLQMVETLQTITLTIHKKVGANGSLFGAITKEEITERLKEQHASLNLDKKDIELKHPIKSTGIYEIEVKLGSGVVGVFKIDVVAE

SEQ ID NO: 11333 - protein, 180 aa, Helicobacter pylori
MFEATTILGYRGELNHKKFALIGGDGQVTLGNCVVKANATKIRSLYHNQVLSGFAGSTADAFSLFDMFERILESKKGDLFKSVVDFSKEWRKDKYLRRLEAMMIVLNFDHIFILSGMGDVLEAEDNKIAAIGSGGNYALSAARALDHFAHLEPRKLVEESLKIAGDLCIYTNTNIKILEL

SEQ ID NO: 11334 - protein, 302 aa, Helicobacter pylori
MMKTKAGFVALIGKPNAGKSTLLNTLLNAHLALVSHKANATRKLMKCIVPFKDKEWYESQIIFLDTPGLHHQEKLLNQCMLSQALKAMGDAELCVFLASVHDDLKGYEEFLSLCQKPHILALSKIDTATHKQVLQKLQEYQQYDSQFLALVPLSAKKSQNLNALLECISQHLSPSAWLFEKDLMSDEKMRDIYKEIIRESLFDFLSDEIPYESDVMIDKFIEEERIDKVYARIIVEKESQKKIVIGKNGVNIKRIGTNARLKMQEVGEKKVFLNLQVIAQKSWSKEEKSLQKLGYIHRRNRD

SEQ ID NO: 11335 - protein, 255 aa, Helicobacter pylori
MKIGVFDSGVGGFSVLKSLLKAQLFDEIIYYGDSARVPYGTKDPTTIKQFGLEALDFFKPHQIKLLIVACNTASALALEEMQKHSKIPVVGVIEPSILAIKRQVKDKNAPILVLGTKATIQSNAYDNALKQQGYLNVSHLATSLFVPLIEESILEGELLETCMRYYFTPLEILPEVVILGCTHFPLIAQKIEGYFMEHFALSTPPLLIHSGDAIVEYLQQNYALKKNACAFPKVEFHASGDVVWLEKQAKEWLKL

SEQ ID NO: 11336 - protein, 67 aa, Helicobacter pylori
MKKGIHPEYIPCKVTCVTSGKEIEVLSTKPEMRIDISSFCHPFYTGSDKIADTAGRVEKFKQRYNLK

SEQ ID NO: 11337 - protein, 287 aa, Helicobacter pylori
MLYFLPTPIGNLADITLRALEVLERCEVFLCEDTRVSKRLLHLLAQNPIISHSFPNIATKKREFIAFHSHNDQEFLNQIKPSFFDKEIAVMSDAGMPSLSDPGMSLAAYALKHNIQYDVLPGANALTTAFCASGFLEGRFFYAGFLPHKSKERRLKIAKILNALAYLEEKTPVVFYESPHRLLETLKDLNDLAKGMHLFAAKELTKLHQQYYLGEVSQIIERLQQSTIQGEWVLVLLNEKKIEPCMGLSALLELDLPPKIKAKIEAVMTQKNAKELYFQRLLEEKNQ

SEQ ID NO: 11338 - protein, 227 aa, Helicobacter pylori
MQAVIYGKQVIMHLLNSHQEKLQEIYLSKEIDKKLFFALKKACPNIIKVDNKKAQSLAKGGNHQGVLAKVELPLAVSLKEVKKAQKLLVLCGITDVGNIGGIFRSAYCLGMGGVILDFAKELAYEGIVRSSLGLMYDLPFSVMPNTLDLINELKTSGFLCLGASMQGSSQIENLSLKKCALFLGSEHEGLSKKILAKMDTILSVKMRRDFDSLNVSVAAGILMDKIN

SEQ ID NO: 11339 - protein, 312 aa, Helicobacter pylori
MAVYLDFENHIKEIQNEIELALIRGDEDAKEILEKRLDKEVKSIYSNLTDFQKLQLARHPDRPYAMDYIDLILKDKYEVFGDRHYNDDKAIVCFVGKIDNVPVVVIGEEKGRGTKNKLLRNFGMPNPCGYRKALKMAKFAEKFNLPILMLVDTAGAYPGIGAEERGQSEAIAKNLQEFASLKVPTISVIIGEGGSGGALAIAVADKLAMMEYSIFSVISPEGCAAILWDDPSKTEVAIKAMKITPRDLKEAGLIDDIILEPSKGAHRDKFSAANTIKEYFLDALRTIQQDPHFLDNRYQKLMSLGSFVESMN

SEQ ID NO: 11340 - protein, 412 aa, Helicobacter pylori
MRRIVVTGMGMINSLGLNKEDSFLAIAKGECGIKHIESFDASAFPVRIAGEITDFDPTEVMNPKDVKKAGRFIQLALKATREAMKDSGILDAHNRCPEELANRMGVSSGSGIGGLGNIEANSIFCFEKGPRKVNPFFITSALVNMIGGFTSIEFGIKGPNLSSVTACAAGTHAIIEAVKTILLNGADKMLVVGAESTICPVGIGGFASIKALSTRNDDPKKASRPFDKDRNGFVMGEGAGALVLEEYESAKRRGAKIYAEFAGYGESGDANHITAPAPEGEGAFRAMKMALEMAKVEIGYVNAHGTSTHYNDLYESIALKNVFGSKEKVPPVSSTKGQIGHCLGAAGALEAVISIMAMNQGILPPTINQEMPDPECDLDYIPNAAREKRVDAVMSNSFGFGGTNGVVIFKKA

SEQ ID NO: 11341 - protein, 78 aa, Helicobacter pylori
MALFEDIQAVIAEQLNVDAVQVTPEAEFVKDLGADSLDVVELIMALEEKFGVEIPDEQAEKIINVGDVVKYIEDNKLA

SEQ ID NO: 11342 - protein, 247 aa, Helicobacter pylori
MQFTGKNVLITGASKGIGAEIAKTLASMGLKVWINYRSNAEVADALKNELEEKGYKAAVIKFDAASESDFIEAIQTIVQSDGGLSYLVNNAGVVRDKLAIKMKTEDFHHVIDNNLTSAFIGCREALKVMSKSRFGSVVNVASIIGERGNMGQTNYSASKGGMIAMSKSFAYEGALRNIRFNSVTPGFIETDMNANLKDELKADYVKNIPLNRLGSAKEVAEAVAFLLSDHSSYITGETLKVNGGLYM

SEQ ID NO: 11343 - protein, 70 aa, Helicobacter pylori
MPGIKVREGDAFDEAYRRFKKQTDRNLVVTECRARRFFESKTEKRKKQKISAKKKVLKRLYMLRRYESRL

SEQ ID NO: 11344 - protein, 366 aa, Helicobacter pylori
MGLSVGIVGLPNVGKSSTFNALTKTQNAQSANYPFCTIEPNKAIVNVPDRRLDALAQIVKPERILHSVVEFVDIAGLIKGASKGEGLGNQFLANIKECEVILQVVRCFEDDNITHVNDKIDPLNDIETIELELILADIAALDKRIDRLQKALKSSKDAKNLLECALSLKTHLEELKPAKTFPLNTSEAFLELDKELRFLSHKKMIYVANVGEEDLNALNEHAKKVKNHAKEQNSEFVALCAKLEEEMVSMSGDEVKEFLQSLGVEESGLEKTIRLSFKELGLINYFTAGVKEVRSWTIKKGSSAPVAAGVIHKDFEKGFIRAETISYDDFIAYKGEAGAKEKGALRIEGKDYIVQDGDVLHFRFNI

SEQ ID NO: 11345 - protein, 324 aa, Helicobacter pylori
MPENSKLQPAKLGKNFDPVDHSNRNFFFSLILSVLLHWLIYFLFEHREDFFPSKPKLVKLNPENLLVLKRGHSQDPSKNTQGAPKPTLAGPQKPPTPPTPPTPPTPPTPPKPIEKPKPEPKPKPKPEPKKPNHKHKALKKVEKVEEKKVVEEKKEEKKIVEQKVEQKVEQKKIEEKKPVKKEFDPNQLSFLPKEVAPPRQENNKGLDNQTRRDIDELYGEEFGDLGTAEKDFIRNNLRDIGRITQKYLEYPQVAAYLGQDGTNAVEFYLHPNGDITDLKIIIGSEYKMLDDNTLKTIQIAYKDYPRPKTKTLIRIRVRYYLGGN

SEQ ID NO: 11346 - protein, 373 aa, Helicobacter pylori
MFSKSLEALHHAKRYRKRELFDPLLKDYASNDYLGLSVKKDLLQNAFNKLQSFVSHSPKASMLVNGYHPLHAELEERLANLLGFESALLVGSGFLGNLALIDTLLVKNALLFMDAHYHASGIFSTKIKPNQVIFFSHNDIKDLKQKLFNAPKNKIKFIAIEGVYSMDASVAPYDFYAIIQEIPNAFLIVDEAHSFGTIGENLLGFLEYYRIKEKDKIIKLSTFSKALASYGACILAPLQTIEFLTNRAKSVIYTTALSLLDTALTLAHLEYFIVQKQELKNELSKHQQIIFETLGIRTLAGFFTLEFESNPALLNAHHFLKEKGFLVGAIRPPTVSKPLLRVSLSLKNSLEDTKELANTLLNYSKIQSSFKSG

SEQ ID NO: 11347 - protein, 577 aa, Helicobacter pylori
MRSHFCTEISEKDVGKIVKVAGWCNTYRDHGGVVFIDLRDKSGLVQLVCDPSSKAYEKALEVRSEFVLVAKGKVRLRGAGLENPKLKTGKIEIVLEELIIENKSATPPIEIGNKHVNEDLRLKYRYLDLRSPNSYEIFKLRSEVALITRNTLAQKGFLEIETPILSKTTPEGARDYLVPSRVHEGEFFALPQSPQLFKQLLMVGGMDRYFQIARCFRDEDLRADRQPEFTQIDAEMSFCDENDVMGVVEDLLQEIFKAVGHTISKPFKRMPYKEAMENYGSDKPDLRFELPLIEVGDCFRDSSNAIFSNTAKDPKNKRIKALNVKGADALFSRSVLKELEEFVRQFGAKGLAYLQIKEDEIKGPLVKFLSEKGLKNILERTDAQVGDIVFFGAGDKKIVLDYMGRLRLKVAETLDLIDKDALNFLWVVNFPMFEKTENGYHAAHHPFTMPKNIECEDIEEVEAHAYDVVLNGVELGGGSIRIHKEEMQKKVFEKINIHEEEAQKKFGFLLEALKFGAPPHGGFAIGFDRLIMLMTKSHSIRDVIAFPKTQKASCLLTNAPSPINEEQLRELHIRLRK

SEQ ID NO: 11348 - protein, 191 aa, Helicobacter pylori
MKQLFLIIGAPGSGKTTDAELIAKNNSETIAHFSTGDLLRAESAKKTERGLLIEKFTSQGELVPLEIVVETILSAIKSSGKGIILIDGYPRSVEQMQALDKELNAQNEVILKSVIEVEVSENTAKERVLGRSRGADDNEKVFHNRMRVFLDPLGEIQNFYKNKKVYKAIDGERSIEEIVGEMQEYILSFGN

SEQ ID NO: 11349 - protein, 449 aa, Helicobacter pylori
MLETPKVLLKNLQDCKIHFIGIGGIGISGLAKYLKAQGATISGSDIAISPSVKYLKALGVEINIPHDPKAINNQDVIIHSAIIKEDNKEIQRAKELEIPILSRKDALYSILKDKRVFSVCGAHGKSSITAMLSAICPSFGAIIGAHSKEFDSNVRESANDSLVFEADESDSSFLFSNPYAAIVPNTEPEHLEHYGHDLERFFFAYEYFLDHAQKRVIYKEDPFLKNYSKNAIVLEKKDIYNIQYILKDGEPYTSFELKDLGAFLVWGLGEHNATNASLAILSALDELHLEEIRNNLLNFKGIKKRFDILQKNALILIDDYAHHPTEISATLKSARIYANLLNTQEKIIVIWQAHKYSRLMDNLEEFKKCFSEHCDRLIILPVYSASEVKRDIDLKAHFKHYNPTFIDRVRKKGDFLELLVNDNVVETIEKGFVIGFGAGDITYQLRGEM

SEQ ID NO: 11350 - protein, 402 aa, Helicobacter pylori
MFELEEGLKELFDIYEKSSHELYLVGGCVRDYLMGITPKDYDLTSNALVNESKELLLKRHFRVLETGIKHGTITALKNHQSYEITTFRIEKGHIKHRKPKELVFSVHLTDDLKRRDFSMNAIAYSPTKGLIDPFKGQNAIENQMIECVGEARLRFFEDALRILRSLRFSATLGFKIAPNTKEAVFACKDLLKHLSKERLQSELNKLLMGKNAYEVAKEYQEILELVIQEKIENLGFLKNAPFNLELRLLGFFKHQKSLESLRYPKKTIVLFSKAKECHKSFLNIHNKTELKFLLKNYDLEPFNLALDFYALKNPKHALKIKGLLKEIFDSNEPFKKEHLALKGGALQSLGYQHQKIGEILNACLDLVIANPKNNALEWLIEWVKGHYLPNDTINLSPIGRRN

SEQ ID NO: 11351 - protein, 422 aa, Helicobacter pylori
MDFLEIVGQVPLKGEVEISGAKNSALPILAATLLSRQEVKIKSLPQVVDIKAMALLLQNLGASLEWLNPNTLQIGAKSLNHTEATYDLVRKMRASILVLGPLLARFKECLVSLPGGCAIGARPVDLHLKAMQQLGAKITIEQGYIHAKAPKGLKGNDILFDKISVTGTENALMAASLAKGITRIINAAKEPEIAQLCAFLQSGGVEIHGIGSSELKIRGVENDALNLKDIQIIPDRIEAGTYLCVGAITNSQLKINHIIPNHLQAITDKLIEIGFSLDIQENSIEIHPAKKRQAFEITTKEYPGFPTDMQAQFMALATQCLGTSVIEETLFENRFMHASELQRLGANISLKTNVATISGSTELTGSDVMATDLRASSALVLAALVAKGVSRVHRIYHLDRGYERLEDKINALGAKVARLKEK

SEQ ID NO: 11352 - protein, 362 aa, Helicobacter pylori
MKHPLEELKDPTENLLLWIGRFLRYKCTSLSNSQVKDQNKVFECLNELNQACSSSQLEKVCKKARNAGLLGINTYALPLLKFHEYFSKARLITERLAFNSLKNIDEVMLAEFLSVYTGGLSLATKKNYRIALLGLFSYIDKQNQDENEKSYIYNITLKNISGVNQSAGNKLPTHLNNEELEKFLESIDKIEMSAKVRARNRLLIKIIVFTGMRSNEALQLKIKDFTLENGCYTILIKGKGDKYRAVMLKAFHIESLLKEWLIERELYPVKNDLLFCNQKGSALTQAYLYKQVERIINFAGLRREKNGAHMLRHSFATLLYQKRHDLILVQEALGHASLNTSRIYTHFDKQRLEEAASIWEEN

SEQ ID NO: 11353 - protein, 168 aa, Helicobacter pylori
MVLYHYYFKTPKSFPLEYLHLCANESHLLRLDFDAANFSHNTPMNTPLKLSVQALERYFLGQLFEFNTPLDLIGTFFQKQVWSALMTIPYGKTKSYDEIAKLINNPRSCRAVGNANRNNPISLIVPCHRVVRKNGTLGGYNGGIEVKKWLLEFESKILNQQAKNSLIS

SEQ ID NO: 11354 - protein, 788 aa, Helicobacter pylori
MITVVKRNGRIEPLDITKIQKYTKDATDNLEGVSQSELEVDARLQFRDKITTEEIQQTLIKTAVDKIDIDTPNWSFVASRLFLYDLYHKVSGFTGYRHLKEYFENAEEKGRILKGFKEKFDLEFLNSQIKPERDFQFNYLGIKTLYDRYLLKDANNNPIELPQHMFMSIAMFLAQNEQEPNKIALEFYEVLSKFEAMCATPTLANARTTKHQLSSCYIGSTPDNIEGIFDSYKEMALLSKYGGGIGWDFSLVRSIGSYIDGHKNASAGTIPFLKIANDVAIAVDQLGTRKGAIAVYLEIWHIDVMEFIDLRKNSGDERRRAHDLFPALWVCDLFLKRVLEDAMWTLFDPYECKDLTELYGQDFEKRYLEYEKDPKIIKEYINAKDLWKKILMNYFEAGLPFLAFKDNANRCNPNAHAGIIRSSNLCTEIFQNTAPNHYYMQIEYTDGTIEFFEEKELVTTDSNITKCANKLTSTDILKGKPIYIATKVAKDGQTAVCNLASINLSKINTEEDIKRVVPIMVRLLDNVIDLNFYPNRKVKATNLQNRAIGLGVMGEAQMLAEHQIAWGSKEHLEKIDALMEQISYHAIDTSANLAKEKGVYKDFENSEWSKGIFPIDKANNEALKLTEKGLFNHACDWQGLREKVKANGMRNGYLMAIAPTSSISILVGTTQTIEPIYKKKWFEENLSGLIPVVVPNLNVETWNFYTSAYDIDAKDLIKAAAVRQKWIDQGQSLNVFLRIENASGKTLHDIYTLAWKLGLKSTYYLRSESPSIDEKSVLDRSVECFNCQ

SEQ ID NO: 11355 - protein, 433 aa, Helicobacter pylori
MLSVIILAAGKGTRMRSSLPKTLHTICGEPMLFYILETAFSISDDVHLILHHQQERIKEAVLERFKGVIFHTQIVEKYSGTGGAIMQKDKTPISTKHERVLILNADMPLITKDALAPLLESKNNAIGLLHLADPKGYGRVVLENHQVKKIVEEKDANDEEKEIKSVNAGVYGFERDFLEKYLPKLHDQNAQKEYYLTDLIALGINENETIDAIFLKEECFLGVNSQTERAKAEEIMLERLRKNAMDLGVVMQLPNSIYLEKGVSFKGECVLEQGVRLIGNCLIENAHIKAYSVIEESQIVNSSVGPFAHARPKSVICNSHVGNFVETKNAKLQGTKAGHLSYLGDCEIGKNTNVGAGVITCNYDGKKKHQTIIGENVFIGSDSQLVAPINIGSNVLIGSGTTITKDIPSGSLSLSRAPQTNIENGYFKFFKKP

SEQ ID NO: 11356 - protein, 391 aa, Helicobacter pylori
MNEVVVVAAKRSAVGSFLGSLKSVGAREMGVSVLKDALNASGLKPSDVDSVILGNVLGAGLGQNIARQIQLDAGIPNDKNAFSVNMVCGSSMKAIQLAHDSIMLGRDEMVVCGGVENMSAAPYLSFDMRDGKRMGNANMIDSMIHDGLWDAFNNYHMGITADNVAQAYHISREDQDNFALQSQLKARAAINAGKFQEEITPIEIANKKGVVVFKEDEYPRETTLESLAKLKPAFKKDGSVTAGNSSGINDGASIIILCSTKKAQTLGLKAMATIKGFGLGGCSPDIMGICPSIAIKNNLKNVKMNLNDIHLFELNEAFAAQSLAVLKELELNPNIVNVNGGAIAIGHPIGASGARILVTLLHEMKRSGHGVGCASLCVGGGQGLSVVVEQK

SEQ ID NO: 11357 - protein, 827 aa, Helicobacter pylori
MQDNSVNETKNIVEVGIDSSIEESYLAYSMSVIIGRALPDARDGLKPVHRRILYAMHELGLTSKVAYKKSARIVGDVIGKYHPHGDNAVYDALVRMAQDFSMRLELVDGQGNFGSIDGDNAAAMRYTEARMTKASEEILRDIDKDTIDFVPNYDDTLKEPDILPSRLPNLLVNGANGIAVGMATSIPPHRMDEIIDALVHVLENPNAGLDEILEFVKGPDFPTGGIIYGKAGIIEAYKTGRGRVKVRAKVHVEKTKNKEIIVLDEMPFQTNKAKLVEQISDLAREKQIEGISEVRDESDREGIRVVIELKRDAMSEIVLNHLYKLTTMETTFSIILLAIYNKEPKIFTLLELLHLFLNHRKTIIIRRTIFELEKAKARAHILEGYLIALDNIDEIVRLIKTSQSPEAAKNALMERFTLSEIQSKAILEMRLQRLTGLERDKIKEEYQNLLELIDDLNGILKSEDRLNGVVKTELLEVKEQFSSPRRTEIQESYENIDIEDLIANEPMVVSMSYKGYVKRVDLKAYEKQNRGGKGKLSGSTYEDDFIENFFVANTHDILLFITNKGQLYHLKVYKIPEASRIAMGKAIVNLISLAPDEKIMATLSTKDFSDERSLAFFTKNGVVKRTNLSEFESNRSCGIRAIVLDEGDELVSAKVVDKNAKHLLIASHLGIFIKFPLEEVREIGRTTRGVIGIKLNENDFVVGAVVISDDGNKLLSVSENGLGKQTLAEAYRGQSRGGKGVIGMKLTQKTGNLVGVISVDDENLDLMILTASAKMIRVSIKDIRETGRNASGVKLINTADKVMYVNSCPKEEEPENLETSSAQNLFE

SEQ ID NO: 11358 - protein, 935 aa, Helicobacter pylori
MDKIIIQGARENNLKNIFLEIPKNQFVVFTGLSGSGKSTLAFDTLYAEGQRRYLESLSSYARQFLDKVGKPNVDKIEGLTPAIAIDQKTTSKNPRSTVGTITEIYDYLRLLFARVGEQFCPTCLEPISSMSTSDIISQICHLEENSKIIILAPIIKDKKGSFNDKLESLRLKGYVRAFVDGVMVRLDEEIHLHKTKKHTIEAVVDRVVVNNENASRIASAIEKALKESYGELEVEILQDNAPSIRKHYSEHKACFKCKMSFEELEPLSFSFNSPKGACESCLGLGTKFSLDISKILDPNTPLNQGAIKVIFGYNRSYYAQMFEGFCEYNGIDSALCFNELNKEQQDALLYGNGTEISFHFKNSPLKRPWKGIIQIAYDMFKEQKDLSDYMSEKTCSSCEGHRLKASSLSVQVAGLKMADFLTKPIEEVYHFFNDPTHFSYLNEQEKKIAEPILKEILERVFFLYDVGLGYLTLGRDARTISGGESQRIRIASQIGSGLTGVLYVLDEPSIGLHEKDTLKLINTLRNLQKKGNTLIVVEHDKETIKHADFVVDIGPKAGRHGGEVVFSGSVKELLQNNHSTALYLNGTKKIERPKFELPKEKHFLEIKNVNINNIKNLSVQIPLKQLVCITGVSGSGKSSLILQTLLPTAQTLLNHAKKTQSLNGVEIVGLEHLDKVIYLDQAPIGKTPRSNPATYTGVMDEIRILFAEQKEAKILGYSASRFSFNVKGGRCEKCQGDGDIKIEMHFLPDVLVQCDSCKGAKYNPQTLEIKVKGKSIADVLNMSVEEAYEFFAKFPKIAVKLKTLMDVGLGYITLGQNATTLSGGEAQRIKLAKELSKKDTGKTLYILDEPTTGLHFEDVNHLLQVLHSLVALGNSMLVIEHNLDIIKNADYIIDMGPDGGDKGGKVIASGTPLEVAQNCEKTQSYTGKFLALELK

SEQ ID NO: 11359 - protein, 300 aa, Helicobacter pylori
MRKTISALFLSACIGLSSVYADNALILQTDFSLKDGAVSAMKGVAFSVDSHLKIFDLTHEIPPYNIWEGAYRLYQTASYWPKGSVFVSVVDPGVGTKRKSVVLKTKNGQYFVSPDNGTLTLVAQTLGIDSVREIDEKANRLKGSEKSYTFHGRDVYAYTGARLASGAITFEQVGPELPPKVVEIPYQKAKATKGEVKGNIPILDIQYGNVWSNISDKLLNQAKIKLNDTLCVTIFKGSKKQYEGKMPYVASFGDVPEGQPLVYLNSLLNVSVALNRDNFAQKYQIKSGADWNIDIKKCAK

SEQ ID NO: 11360 - protein, 240 aa, Helicobacter pylori
MDILKAEHLNKQIKKTKIVSDVSLEVKSGEVVGLLGPNGAGKTTTFYMICGLLEPSGGSVYLNDVNLAKYPLHKRSNLGIGYLPQESSIFKELSVEENLALAGESTFKNSKESEEKMESLLDAFNIQAIRERKGMSLSGGERRRVEIARALMKNPKFVLLDEPFAGVDPIAVIDIQKIIESLIGLNIGVLITDHNVRETLSVCHRAYVIKSGTLLASGNANEIYENALVRKYYLGENFKV

SEQ ID NO: 11361 - protein, 369 aa, Helicobacter pylori
MLLFTPGPVAINEEMRTSFSQPMPHHRTKDFEKIFQSVRENLKKMTGLEEVLLLSSSGTGAMEASVISLCQKELLFVNAGKFGERFGKIAKAHSIKAHELVYEWDTPAQVDEILSVLKANPNIDAFCIQACESSGGLRHPVEKIAQAIKETNPNVFVIVDAITALGVEPLEITHVDALIGGSQKAFMLPPAMSLVALSQNAIERIEERNVGFYFNLKSELKNQRNNTTSYTAPILHTLGLQRYFELVQNLGGFEALYRETKKAALATQKAVLALGLKIFPKSPSLSMTTIVNEHAKELRNLLKEKYQVQFAGGQEPYKDALIRINHMGIIPVYKSAYALNALELALNDLDLREFDGVANATFLKQYYGI

SEQ ID NO: 11362 - protein, 318 aa, Helicobacter pylori
MKARGFKAKMRGFKIFSGSAHPAFGKEVSKHLGFPLSKAVIGKFSDGEINIQISESVRGKDIFIIQPTCVPVNDNLMELLVMVDALRRSSANSITAVLPYFGYARQDRKAAPRVPITAKMVANLMQEVGIERIITMDLHAGQIQGFFDVPVDNLYGSIVFRDYIRSKALKNPVIASPDVGGVTRARYFANQMGLDLIIVDKRREKANESEVMNIIGSAKERDVILVDDMIDTAGTICKAALALKEQGATSVMALGTHAVLSGNAIKRIKESALDEVVVTNSIPLVQKCDKITTLSVAPLFAEVIRRIYHNESVQSLFT

SEQ ID NO: 11363 - protein, 853 aa, Helicobacter pylori
MMKDFLEDYKKSVSERGSEGIPPLPLNAKQVQAVVEILTKDPTNAAFAKELLIHRVSPGVDEGAKVKAEFLAKLSQKKLECVHISALEATTLLGTMLGGYNVEPLIMGLESQDKNIAKESAKALKTTLLVYGSFDKIAAMSKTNALAKEVLESWANAEWFLNKEPLNECIEACVFKIDGETNTDDLSPASDAFTRSDIPLHAKAMLKNRIENYEQRIKAIKTKGVPVAYVGDVVGTGSSRKSATNSIMWHFGKDIPFVPNKRSGGIVIGGVIAPIFFATCEDSGALPIVADVKDLKEGDLIKIYPYKGEITLNDKVVSTFKLEPETLLDEVRASGRIPLIIGRGLTNKARKFLGLGESEAFKKPSAPKSDAKGYTLAQKIVGHACGVKGILPGTYCEPKVTTVGSQDTTGAMTRDEVKELASLKFDAPFVLQSFCHTAAYPKPSDVSLHATLPGFITQRGGVALHPGDGVIHTWLNRMGLPDTLGTGGDSHTRFPLGISFPAGSGLVAFAAVTGTMPLNMPESVLVRFKGEMNPGITLRDLVNAIPYYAIKKGLLTVEKKGKINVFNGRILEIEGLPDIKMEQAFELSDASAERSAAACVVRLNKEPMIEYLKSNIKLIDEMIASGYEDKETLKKRRDAMQAWVDNPVLLEPDSNAQYAAVIEIDVAEITEPILACPNDPDDVATLSEVLADTTGKRPHAIDEVFIGSCMTNIGHFRAFGEIVKNAPPSQARLWVVPPSKMDEQELINEGYYAIFGAAGARTEVPGCSLCMGNQARVRDNAVVFSTSTRNFDNRMGRGAKVYLGSAELGAACALLGRIPTKEEYMNLVSEKLESQKDKIYRYMNFNLMENFRL

SEQ ID NO: 11364 - protein, 865 aa, Helicobacter pylori
MIKAIIGKIIGTRNDRWIKQYKKQVLTINALEPTYEKMSDDELQNAFEELKKRVRSTEKDLQEKTLLEVLPESFAITREASKRILKMCHFDVQLIGGMVLNDGKIAEMKTGEGKTLVATLAVALNALKGESVYVVTVNDYLAHRDSKEMEPLYHFLGYSVGTITASVRDDDERLEIYSKDIVYGTNNEFGFDYLRDNMKYSLEHKVQKSHAFAIVDEVDSILIDEARTPLIISGPVDRRMENYNKADEVAKSMQVEIDFTIDEKNRAILITEEGIKKAENLFGVDNLYKIENAALSHHLDQALKANYLFFIDKDYIVANNEVVIVDEFTGRLSEGRRFSEGLHQALEAKEGVSIKEESQTLADITFQNYFRMFSKLAGMTGTAQTEATEFLEIYNLEVVSIPTNLAIKRKDLNDLIYKSEKEKFDAVILKIKELHDKGQPVLVGTASIEKSETLHALLKKERIPHTVLNAKQHTKEAEIIKDAGLKGAVTIATNMAGRGVDIKLTDEIKELGGLYIIGTERHESRRIDNQLRGRSGRQGDPGTSQFYLSLEDNLLRIFGSDRIKGVMEKLGLKDGEHIESKLVTRAVENAQKKVENLHFESRKHLLEYDDVANEQRKSVYKFRDELLDVNYDISAKIAENREYALNQIFSKLKAFDHQNLSEEELLGLKNILKEDFNAHVSLEDLKKASPIENFVAEKLKSDYENKMKVLDSEQRSRIERIVYLQILDNAWREHLYTMDNLKTGINLRGYNQKDPLVEYKKESYNLFLEFIEDIKTEAIKTFSKIQFENEQDSSDAERYLDNFSEEREHESVTYRHEEALDEDLNVAMKAFAKTPKRNEPCPCQSGKKYKDCCAKSGPKKGLFAK

SEQ ID NO: 11365 - protein, 686 aa, Helicobacter pylori
MQEYHIHNLDCPDCASKLERDLNELDYVKKAQINFSTSKLFLDTSDFEKVKAFIKQNEPHLSLSFKEATEKPLSFTPLIITIMVFLGAILILHLNPSPLIEKAMFFVLALVYLVSGKDVILGAFRGLRKGQFFDENALMLIATIAAFFVGAYEESVSIMVFYSAGEFLQKLAVSRSKKSLKALVDVAPNLAYLKKGDELVSVAPEDLRVNDIVVVKVGEKVPVDGVVVKGESLLDERALSGESMPVNVSENSKVLGGSLNLKAVLEIQVEKMYKDSSIAKVVDLVQQATNEKSETEKFITKFSRYYTPSVLFIALMIAVLPPLFSMGSFDEWIYRGLVALMVSCPCALVISVPLGYFGGVGAASRKGILMKGVHVLEVLTQAKSIAFDKTGTLTKGVFKVTDIVPQNGHSKEEVLHYASCSQLLSTHPIALSIQKACEEMLKDDKHQHDIKNYEEVSGMGVKAQCHTDLIIAGNEKMLDQFHIAHSPSKENGTIVHVAFNQTYVGYIVISDEIKDDAIECLRDLKVQGIENFCILSGDRKSATESIAQTLGCEYHASLLPEEKTSVFKTFKERYKAPAIFVGDGINDAPTLASADVGIGMGKGSELSKQSADIVITNDSLNSLVKVLAIAKKTKSIIWQNILFALGIKAVFIVLGLMGVASLWEAVFGDVGVTLLALANSMRAMRA

SEQ ID NO: 11366 - protein, 344 aa, Helicobacter pylori
MILKRVTEALEAYKNGEMLIVMDDEDRENEGDLVLAGIFSTPEKINFMATHARGLICVSLTKDLAKKFELPPMVSVNDSNHETAFTVSIDAKEARTGISAFERHLTIELLCKDTTKPSDFVRPGHIFPLIAKDGGVLARTGHTEASVDLCKLAGLKPVSVICEIMKEDGSMARRGDKFLSDFALKHNLKTLYVSDLISYRLENESLLKMFCQEEREFLKHQTQCYTFLDHQQKNHYAFKFKGAKTHDLAPLVRFHPIKEDFDFLTTDAFEVFFKALEYLKHEGGYLIFMNTHSKENNVVKDFGIGALVLKNLGIKDFRLLSSCEDRQYKALSGFGLKLVETISL

SEQ ID NO: 11367 - protein, 119 aa, Helicobacter pylori
MIGIDIVSIARIEKCVKRFKMKFLERFLSPSEIVLCKDKSSSIAGFFALKEACSKALQVGIGKELSFLDIKISKSPKNAPLITLSKEKMDYFNIQSLSASISHDAGFAIAVVVVSSSNE

SEQ ID NO: 11368 - protein, 226 aa, Helicobacter pylori
MEHRVFTIANFFSSNHDFITGFFVVLTAVLMFLISLGASRKMQMVPMGLQNVYESIISAILSVAKDIIGEELARKYFPLAGTIALYVFFSNMIGIIPGFESPTASWSFTLVLALIVFFYYHFEGIRVQGFFKYFAHFAGPVKWLAPFMFPIEIISHFSRIVSLSFRLFGNIKGDDMFLLIMLLLVPWAVPVAPFMVLFFMGILQAFVFMILTYVYLAGAVLTDEGH

SEQ ID NO: 11369 - protein, 453 aa, Helicobacter pylori
MITLKQALSLSQDELETLKNEIDAKVRASDLNAYIKAPSLNGASAKGVPILIKDNISVKGWEITCSSKILEGYVAPYHASVMENLHQNSMAGFGLSNMDEFAMGSTTESSCYGITKNPRDKNRVPGGSSGGSAAAVAGGLAVAALGSDTGGSIRQPASYCGCVGLKPTYGRVSRYGLIAYCSSFDQIGPITQNVEDASILFDAISGYDSKDSTSANLKPTQTFKNLNRDKRFKIAVLMDHIKDASNEVQLAYENTLKALKEMGHEIVEKKMLDSHYQISIYYIISMAEASSNLARFDGVRYGRRAQNIKDLKELYLKSRSEGFGDEVKRRIMLGNFVLSSGYYDAYYLKAQQMRLIIKEQYNKIFEEVDLIFTPVAPTSAHLFNYHASPLEMYLSDIYTIGANLSGLPALSLPVAKDPLGLPIGMQFIAKAFDEQSLLDVSYALEQELDLKLD

SEQ ID NO: 11370 - protein, 458 aa, Helicobacter pylori
MNTSHKTLKTIAILGQPNVGKSSLFNRLARERIAITSDFAGTTRDINKRKIALNGHEVELLDTGGMAKDALLSKEIKALNLKAAQMSDLILYVVDGKSIPSDEDLKLFREVFKINPNCFLVINKIDNDKEKERAYAFSSFGMPKSFNISVSHNRGISALIDAVLSALDLNQIIEQDLDADILESLETPNNALEEEIIQVGIIGRVNVGKSSLLNALTKKERSLVSSVAGTTIDPIDETILIGDQKICFVDTAGIRHRGKILGIEKYALERTQKALEKSHIALLVLDVSAPFVELDEKISSLADKHSLGIILVLNKWDIRYAPYEEIIATLKRKFRFLEYAPVITTSCLKARHIDEIKHKIIEVYECFSKRIPTSLLNSVINQATQKHPLPSDGGKLVKVYYATQFATKPPQISLIMNRPKALHFSYKRYLINTLRKEFNFLGTPLILNAKDKKSAQQN

SEQ ID NO: 11371 - protein, 94 aa, Helicobacter pylori
MNKAEFIDLVKEAGKYNSKREAEEAISAFTLAVETALSKGESVELIGFGKFETAEQKGKEGKVPGSDKTYKTEDKRVPKFKPGKTLKQKVEEGK

SEQ ID NO: 11372 - protein, 333 aa, Helicobacter pylori
MPNHQNMLDNQTILITGGTGSFGKCFVRKVLDTTNAKKIIVYSRDELKQSEMAMEFNDPRMRFFIGDVRDLERLNYALEGVDICIHAAALKHVPIAEYNPLECIKTNIMGASNVINACLKNAISQVIALSTDKAANPINLYGATKLCSDKLFVSANNFKGSSQTQFSVVRYGNVVGSRGSVVPFFKKLVQNKASEIPITDIRMTRFWITLDEGVSFVLKSLKRMHGGEIFVPKIPSMKMTDLAKALAPNTPTKIIGIRPGEKLHEVMIPKDESHLALEFEDFFIIQPTISFQTPKDYTLTKLHEKGQKVAPDFEYSSHNNNQWLEPDDLLKLL

SEQ ID NO: 11373 - protein, 866 aa, Helicobacter pylori
MQVIHQYSNKGGKYQNRYDVSILVNGLPLVHVELKKRGVAIREAFNQIKRYKRDSFSAEDGLFDFVQIFVISNGTSSKYYSNTTRIAQLEKNHKADTFEFTNYWADSKNHNIEDLMDFAKAFFAKRSLLNVLTCYCVFTSEEVLLVMRPYQIVAAERILEKIKTAQNSKTKNQSKGYIWHTTGSGKTLTSFKSATLAKELESVSKVLFVVDRKDLDYQTMKEYDKFQKDCANSNTSTKILKEQLEDSNAKIIITTIQKLDKFVKSHKGHAIFNEEVVMIFDECHRSQLGSMHQAITKAFKKYHLFGFTGTPIFAANCDKNNPLGTTEQKFGKCLHQYTIIDAIRDKNVLPFRVEYHNTIKAKEDIKDNKVRAVDEKNALLDTRRIKEITKCILERFNQATKNKKFNSILACSSIEALKKYYQAFKEEKHDLKIAAIFSYSANEEIDTLEDENNESACRLDKSSRDFLEGAIADYNGMFGVSFDTSDQKFQSYYKDLSQKMKERKIDLLMVVNMFLTGFDATRLNTLWVDKNLKYHGLIQAFSRANRILDSVKTHGNIVCFRDLEQDLNDALMLFGNKDAQSIALLRKYEDYLKGYTDNNKEYEGYEGLIKRLLTEFPLKEPIVSESQKKDFIKLFGKILKLENILNSFENFKKDDYINPRDFQDYQSKYLDFYDAMRSEKGKDKEEINDDLIFEIELIKQVEVNIDYILNLIEEFAKEHGVEIQGVKTKIEPIINSSIELRNKKDLIMDFIDKYNKDQEVHAHFQDYIHQKREEEFQNIIEENRLNEEKAYSFMQHAFKGGEISFSGTEFPKIIEEKPSMFGKNSRYQEVKEKVAASLSRFFHRFCDLTSAIFKKNEVKKDEVNEK

SEQ ID NO: 11374 - protein, 527 aa, Helicobacter pylori
MENNPNNNQASLERNELHNTIWKVANELRGSVDGWDFKQYVLGILFYRYISENMTHYINKEERKRDPSFDYAKLSDEKAERGRKHLIEQKGFFIPPSALFCNALKNACHNEDLNVTLQNIFNEIEKSSLGTPSEENVKGLFADLDVNSNKLGSSHQNRVEKLTKILEAIGGMQLGDYLKSGIDVFGDAYEYLMAMYASNAGKSGGEFFTPQEVSELLAKITLHGQESVNKVYDPCCGSGSLLLQFSKVLGDKNVSKGYFGQEINLTTYNLCRINMFLHDINYSKFHIAHGDTLLDPKHEDDEPFDAIVSNPPYSTKWVGDSNPILINDERFSPAGVLAPKNAADLAFTMHMLSYLSNSGTAAIVEFPGVLYRGNAEAKIREYLVKENVIDCVIALPDNLFFGTSIATCILVLKKNKQDDTTLFIDASKEFVKEGKKNKLKERNREKILQTYIERKEIKHFCALANIEKIKENDYNLSVNRYVEQEDTKEAIDIKALNSEIAQIVEKQSALRNRLESIIKELEGGQNA

SEQ ID NO: 11375 - protein, 227 aa, Helicobacter pylori
MVFDRTISVREKKAAKTLGIIGIVFFILFGIVISGVAFQKEWVQQLDLFFIDLIRNPAPIQKSAWLSFVFFSTWFAQSKLTTPIALLIGLWFGFQKRIALGVWFFFSILLGEFTLKSLKLLVARPRPVTNGELVFAHGFSFPSGHALASALFYGSLALLLCYSNANNRIKTIIAVVLLFWIFLMAYDRVYLGVHYPSDVLGGFLLGIAWSCCSLALYLGFLKRPYNQ

SEQ ID NO: 11376 - protein, 533 aa, Helicobacter pylori
MLQTINLTQRYATKKLFENVNIKLDKNKRYGLIGANGAGKSTFLKILSKSIDCSSGEVIITSGMKMGVLGQDQYAFEDLSLKDAVLIGNKRLYDAIKEKERLYTEGDLSDDKVNARLGELETICVEEDPMYECEVAIEKILEDLGIPSSKHNDLMKTLPSSDKFKILLAQVLFPKPDILLLDEPTNNLDLNAIEWLENNLKRHEGTMVVISHDRHFLNAVCTHILDLDFHSVREFSGNYDDWYIASTLIAKQQEAERNKKLKEKEELEKFIARFSANASKAKQATSRQKQLDKLDIQSLAVSSRRDPSIIFKPKRTIGNEALECENISKSYDDQIVLNQVSLKVMPKDKIALIGPNGVGKSTLCKILVEELKPDKGVVKWGATVSKGYFPQNVSEEISGEETLYQWLFNFNKKIESAEVRNALGRMLFNGEEQEKCVNALSGGEKHRMVLSKLMLEGGNFLVLDEPTNHLDLEAIIALGEALFKFDGALICVSHDRELIDAYANRIIELVPSPKGASIIDFKGSYEEYLASKK

SEQ ID NO: 11377 - protein, 246 aa, Helicobacter pylori
MQMMHNLSFLGMFLAALSMSLGHCVGMCGGIVSAFSQIRFSKVTSFSYQLTCHALYNVGRISTYMLLGAIAASLGHSLSVSMGFRGVLFISMGIILICLALLGARMEKLSFQIPFISFLMKKTLQSQNILGLYFLGVLNGFLPCMMVYSFLASVILSHSAFMGAMLGLSFGLGTSMPLFLMGIFLSKISVSYRKFFNLLSKILMGVFGLYILYMGIMLINHKMPHAMHHQNNTTQHDHKGVHSHEH

SEQ ID NO: 11378 - protein, 360 aa, Helicobacter pylori
MPTILVSALEASSNAHLEELRQNLPEDYRFIGVFEGKEVLYSPREFSIMGFRDVIGRLGFLLKAHKEMVQLAKQADMVLLMDSSSFNIPLAKKIKKQDPHKKIMYYILPQVWAWKKWRAKSLEKYCDFLGAILPFEVGYYQKKAQYVGHPLLDEIKHYKKDIKGETLVFMPGSRKSEIAKMFPLFVKAAQMLEQNEGFKRRVLVVPSFFKGLDLKALYGEDIQLFEISYDAHKSLFEAEFAFICSGTATLEAALIGTPFVLAYRAKTMDFLIARMLVNLHYIGLANIFYNALNNETPGLGESQLHPELIQHFLSVEGLLKAYKEMDRERYFKESLRLREYLKHGSARKIANEMAFLLNLT

SEQ ID NO: 11379 - protein, 255 aa, Helicobacter pylori
MVLEVKNLSFKYSQKLILDKLSFSVPKNSITSILAPNGSGKTTLLKCLLGLLKPLEETEIKACNKDILPLKPYEKAKLIAYIPQVEYYAFNFSVLDFVLMGKATHLNLFAMPKAKHIKEATSVLERLDLESLKDQGINDLSGGQRQMVLLARSLLQRTPLLLLDEPTSALDLKNQALFFDAIKDEMKKRELSVLVNIHDPNLVARHSTHVVMLKDKKLFLQASTPIAMTSHNLSALYDTPLEAIWHDNKLVVYAL

SEQ ID NO: 11380 - protein, 326 aa, Helicobacter pylori
MLKTYHIALACVILAVVVLLFGGESLSLEEWQEVCLNVKNHFLHNEELSSLSIIILEIRLPRVILALLVGASLSGSGVVMQTIFRNPLVDPFLLGISSGAMLGVAMAIAVVESNIAILAFFGAILASLAVLAMNRVLGNSVLSLVLSGVVLSAFLSALAGAIKFFVIPQKAQAIVVWLLGSLSLSSYKDCLIAFIGLSLGFIPLFLLRWRINLLSLSDAQSLSLGINPVLLRSLCLVCVSVASALAVSVSGTIGWIGLVIPHVARLFFGANLQKLLLSSLLMGAFFLLLADVVAKTITPYDLPVGIATSVLGAPFFLWLLFRTRGV

SEQ ID NO: 11381 - protein, 193 aa, Helicobacter pylori
MNTYKNSLNHFLNLVDCLEKIPNVGKKSAFKMAYHLGLENPYLALKITHALENALENLKTCSSCNALSESEVCEICSDESRQNSQLCMVLHPRDVFILEDLKDFLGRYYVLNSIEEVDFNALEKRLIEENIKEIIFAFPPTLANDSLMLYIEDKLQHFHLTFTKIAQGVPTGVNFENIDSVSLSRAFNSRIKA

SEQ ID NO: 11382 - protein, 303 aa, Helicobacter pylori
MSSPNLSFYYNECERFESFLKNHHLHLESFHPYLEKAFFEMVLNGGKRFRPKLFLAVLCALVGQKDYSNQQTEYFKIALSIECLHTYSLIHDDLPCMDNAALRRNHPTLHAKYDETTAVLIGDALNTYSFELLSNALLESHIIVELIKILSANGGIKGMILGQALDCYFENTPLNLEQLTFLHEHKTAKLISASLIMGLVASGIKDEELFKWLQAFGLKMGLCFQVLDDIIDVTQDEEESGKTTHLDSAKNSFVNLLGLERANNYAQTLKTEVLNDLDALKPAYPLLQENLNALLNTLFKGKT

SEQ ID NO: 11383 - protein, 256 aa, Helicobacter pylori
MKKVLFLLVISFFGGFLNASSLYEKLINKETISVGTEGIYPPFTYHNKEGKLTGYDVEVARELAKELGVKIKFHETSWDIMLTGLKSGRFDMVANQVSLATKKRQAAFDKSLPYSYSGTIMLVRKDENRIKDIKDIKGLRAANTLSSTYGEIAFKYDAQIVSVDSMAQALLLVAQKRADLTLNSSLAILNYLNTHKDNPFKIAWESKEKDGGASFVINKHQEKALELINQAMQRLINKGVLKRLGEQFFGKDVSQP

SEQ ID NO: 11384 - protein, 450 aa, Helicobacter pylori
METIDSVVRLLSNLVWGIPMQILLVGTGLFLTFYLRGLQFSKIFYAIKILFDKESQSKGDISQFSALMLSLGATVGIGSIVGVATAISIAGPGAVFWMWVTGLVGMATKYSEGILAVKYREKGAFGYNGGPMYYIKNGLNMPKLAMAFAIFTIIASIGTGNMTQSNAVSSILSEQANLPNWVSGLLLTLLTAFIVIGGIKSIGKFTSYLAPVMVLLYLIAIIYIIVSHFDLALQAIKLIFEEAFNPKPVVGGASGALIATMIKTGVARGLYSNEAGLGSSAIIAASAQTRHPVRQALVSMLQTFIVTLIVCSATASVILMAPEYNTLLPNGEKLSANLLTLKSTEYFLGSLGTVVIFTTMIFFAYSTIIGWAYYGEKCTEYAFGEKKVKYYRLIFLASVMVGAMAKIDFVWNLADLSNGLMAIPNLIALILLHKVVYSETRWYFSKHSNK

SEQ ID NO: 11385 - protein, 289 aa, Helicobacter pylori
MGFADFFKNFKINKLRTAPSKEEQPSHWVKCPKCYALMYHKEVFSKYSVCLKCHYHFRMKAAERIEFLCDVGSFEEFDKHLRPNDPLNFVDKESYKQRIKKYEKRTNRPSSVISGEAKINRMPLQIVVFDFSFMGGSLGSVEGEKIVRAINRAVAKREALLIVSASGGARMQESTYSLMQMAKTSAALNRLSEAKLPFISLLSDPTYGGVSASFAFLGDLIIAEPGAMIGFAGPRVIKQTIGADLPEGFQTAEFLLEHGLIDMIVHRKDLKKTLSDLIAMMTHKTSKIF

SEQ ID NO: 11386 - protein, 436 aa, Helicobacter pylori
MNFQENLAALDLEYLWHPCSQMQEHQNFPIIPIKKAQGIYLYDFNDNAYMDLISSWWVNLFGHNNAYISQQLKNQIDDLEHVLLASFSHKPIITLSQRLCQLTHMDKCFYADNGSSCVEIALKMSYHAHFLKNQTRRKKLFLSLSNSYHGETLGALSVGDVKLYKDTYTPLLLKNLTTPVPKNDHEIENSLNALKRLLDKHSEEICAFIAEPLLQCAGNMHIYSARYLKQAVLLCKQKNIHIIFDEIATGFGRTGSMFAYEQCEIKPDFLCLSKGISGGYLPLSALLTHNEIYNQFYAPYEENKAFLHSHSYTGNALACACANATLDIFEKENVIEKNKALSGFIFNTLQNALKPLMEQQVVSDLRHLGMVFAFEVFIQTKERLSLAVFKKTLKKGLLLRPLNNTIYLMPPYIITHEEVKKAVAGLVEILDELRKG

SEQ ID NO: 11387 - protein, 262 aa, Helicobacter pylori
MNGSNHMKNKTLVISGATRGIGKAIFVRFAQSGVNIAFTYNKNVEEANKIIEDVEQKYSIKAKAYSLNVLEPEQYTELFKQIDADFDRVDFFISNAIIYGRSVVGGFAPFMRLKPKGLNNIYTATVLAFVVGAQEAAKRMQKIGGGAIVSLSSTGNLVYMPNYAGHGNSKNAVETMVKYAAVDLGEFNIRVNAVSGGPIDTDALKAFPDYVEIKEKVEEQSPLKRMGNPNDLAGAAYFLCDETQSGWLTGQTIVVDGGTTFK

SEQ ID NO: 11388 - protein, 519 aa, Helicobacter pylori
MLLIVFFKFYFQYSIKKKSFYFIFVIIQAIFIFNLRRCRMDNQKITHQNITQKQGELKRDMKMRHLLMIAFGGAIGTGLFVGTGGNIASAGPLGTLIAYCFGGLVVYCIMLSLGELASVYPTTGSFGDYAAKFIGPGTGYMVFWMYWLGWVITVALEYIAIGMLMQRWFADIPIHYWVILCIALVFLLNFFSVKIFAEGEFFFSLIKVLAVIAFIGIGAIGIIYQIYSHGFGSIFDNFHFGDKGFFPNGSAAVFSAMLAVIFAFTGTEVIGVAVGETKNASEVMPKAIKATLWRIVFFFLGSVFVISVFLPMNDSSITQSPFVSVLERINLPFIGMGIPYVADIMNAVIITAMFSTANSGLYGASRMIYGLSKQKMFFKVFSQLNRQGTPTYAMFFSLSFSLIGLLVQIYAKENVVEALINVISFTVIIVWVSVSVSQYSFRKQYLKAGHSLEDLPYKAPFLPFLQLIGITGCAIGVIGSAMDKDQRIGMILTIVFAVICYIGYYFTQKANENNKKDLI

SEQ ID NO: 11389 - protein, 357 aa, Helicobacter pylori
MKGLERESHFTLNENAMFFECAYSCDNALFLQLDDRSFFITDSRYTQEAKESVQPKNGVLAEVVESSDLVQSAIDLIVKSSVKKLFFDPNQVNLQTYKRLNSALGDKVALEGVPSYHRQKRIIKNEHEIQLLKKSQALNVEAFENFAEYVKKIFDEKESLSERYLQHKVKDFLTREGVYDLSFEPILALNANASKPHALPSAKDFLKAEHSILLDMGIKYERYCSDRTRTAFFDPKDFVFKREQSFKDKERQKIYDIVKEAQEKAISGIRAGMTGKEADSLARGVISDYGYGQYFTHSTGHGIGLDIHELPYISSRSETILEEGMVFSVEPGIYIPGFFGVRIEDLVVIKNSRSELL

SEQ ID NO: 11390 - protein, 662 aa, Helicobacter pylori [sequence omitted]

SEQ ID NO: 11391 - protein, 944 aa, Helicobacter pylori
MSGMVDLKEFLAELGKTQKELKNVIEQAKDIGLELKTNSKMTPEQAGKLYKYIVDGIKEQIQANQPAKNPEQDNKDDLNTAVASKSLNKKVSKTPKKEETKSQPKPKKTKEKKKEAPTPIAKKKGGIEIVNTFENQTPPTENTPKVVSHSQIEKAKQKLQEIQKSREALNKLTQSNANNASNANNAKKEISEVKKQEQEIKRHENIKRRTGFRVIKRNDEVENESENSVTESKKPTQSAAAIFEDIKKEWQEKDKQEAKKAKKPSKPKATPTAKNNKSHKIDFSDARDFKGNDIYDDETDEILLFDLHEQDNFNKEEEEKEIRQNINDRVRVQRKNPWMNESGIKRQSKKKRAFRNDNSQKVIQSTTAIPEEVRVYEFAQKANLNLADVIKTLFNLGLMVTKNDFLDKDSIEILAEEFHLEISVQNTLEEFEVEEVLEGVKKERPPVVTIMGHVDHGKTSLLDKIRDKRVAHTEAGGITQHIGAYMVEKNDKWVSFIDTPGHEAFSQMRNRGAQVTDIAVIVIAADDGVKQQTIEALEHAKAANVPVIFAMNKMDKPNVNPDKLKAECAELGYNPVDWGGEHEFIPVSAKTGDGIDNLLETILIQAGIMELKAIEEGSARAVVLEGSVEKGRGAVATVIVQSGTLSVGDSFFAETAFGKVRTMTDDQGKSIQNLKPSMVALITGLSEVPPAGSVLIGVENDSIARLQAQKRATYLRQKALSKSTKVSFDELSEMVANKELKNIPVVIKADTQGSLEAIKNSLLELNNEEVAIQVIHSGVGGITENDLSLVSSSEHAVILGFNIRPTGNVKNKAKEYNVSIKTYTVIYALIEEMRSLLLGLMSPIIEEEHTGQAEVRETFNIPKVGTIAGCVVSDGVIARGIKARLIRDGVVIHTGEILSLKRFKDDVKEVSKGYECGIMLDNYNEIKVGDVFETYKEIHKKRTL

SEQ ID NO: 11392 - protein, 270 aa, Helicobacter pylori
MSMQTAPIKKITLNHLQAKKNQEKIIAITAYDALFAQIFDPLVDVILVGDSLNMSFFNQNDTLSASVEMMLYHTKAVCAGAKTPFIITDMPFGSYKDEKTALKNAIRVYKETQASAIKLEGGKEKAKLVKTLTNEGVIVVGHIGLMPQFVRLDGGYKIKGKNEEQQKKLLEDALSLEEAGVGLLVLEGITTPIAQKITQKIKIPTIGIGSGKDCDGQILVWSDMLGFFDSFKPKFVREYLKGKELIQNAIKQYADDVKKGNFPNELESYH

SEQ ID NO: 11393 - protein, 632 aa, Helicobacter pylori
MKPTNEPKKPFFQSPIILAVLGGILLIFFLRSFNSDGSFSDNFLASSTKNVSYHEIKQLISNNEVENVSIGQTLIKASHKEGNNRVIYIAKRVPDLTLVPLLDEKKINYSGFSESNFFTDMLGWLMPILVILGLWMFMANRMQKNMGGGIFGMGSAKKLINAEKPNVRFNDMAGNEEAKEEVVEIVDFLKYPERYANLGAKIPKGVLLVGPPGTGKTLLAKAVAGEAHVPFFSMGGSSFIEMFVGLGASRVRDLFETAKKQAPSIIFIDEIDAIGKSRAAGGVVSGNDEREQTLNQLLAEMDGFGSENAPVIVLAATNRPEILDPALMRPGRFDRQVLVDKPDFNGRVEILKVHIKGVKLANDVNLQEVAKLTAGLAGADLANIINEAALLAGRNNQKEVRQQHLKEAVERGIAGLEKKSRRISPKEKKIVAYHESGHAVISEMTKGSARVNKVSIIPRGMAALGYTLNTPEENKYLMQKHELIAEIDVLLGGRAAEDVFLEEISTGASNDLERATDIIKGMVSYYGMSSVSGLMVLEKQRNAFLGGGYGSSREFSEKTAEEMDLFIKNLLEERYKHVKQTLSDYREAIEIMVKELFDKEVITGERVREIISEYEVANNLESRLIPLEEQAS

SEQ ID NO: 11394 - protein, 551 aa, Helicobacter pylori
MKLFFKRYSKYLKEHYKSFIVVLFSSLVVALSTAWGTYLVKPTLDEIFINKDTHMLKILPFLVILAYLGKSGGMYLGTYFTNFIGLDIVKKIRNTMLESLLKMEMDFFNRTKKGELIARITNDIGLIRASLSNYLSESIREGLTIVGLVGVVIYQSPKLALVGLVIMPLAAIPISKIIRKVKKLAKSHQESNAKITARLSEVFNNVEAIKISNGEKLEHKAFVKENEAFFKIGIKNIAVAEISSPLMEFLGSIAIALVIYLGGNEVIRGHISVGAFFSFITALFMLYTPIKRLTRIVSNFQEALVASDRIHEILEREPAIVDGELTLNNAIHTIEFKKVWLAYTLDNQERYVLNDISLKFQQNEIIALKGESGSGKSSLVNLILRLYEPSKGEIFINDQKIESITQKSLREKISVVTQRVFIFNGSVAENVAYGLEIDEVKIKECLKKAQALDFVEKMPHGIESVLDEFGANLSGGQRQRIAIARALYKDVQVLIFDEATSALDNNTEESVKQSILELKQNRLIILISHNPSTLKLATKHVKLEHGRLTEC

SEQ ID NO: 11395 - protein, 641 aa, Helicobacter pylori
MRLSNADLERLKSMANALRFLCADMIDKANSGHPGVCLGLADVMVVLSLHLNLNPTNPKWLNRDRLVFSGGHASALAYSLLHLWGFDLSLEDLKRFRQLHSKTPGHPELHHTEGIEITTGPLGQGFANAVGFSMASQYAQNLLDKEAISHKVYCLCGDGDLQEGISYESASLAGHLRLDNLIVIYDSNQISIEGAINISFSEQVKTRFVAQNWEVLECDGHDYQAIHNALEEAKKSTKPTLLIAHTIIGKGAVGLEGSEKTHGSPLNKEVLKQSKENAQINPNESFIISPKNKMHFEEVKVRGVSLEALWEKSLSPKIKEKIHALKDFDFSAIHYPTFKKGESLATRVSNGMILNAIAKECEGFLGGSADLAPSNNTQLKHSGDFPLGQNLHFGIREHAMGAITNALAAYGLFVPFCATFFVFSDYLMPSIRLSALMKLKALFIFTHDSIGVGEDGATHQPIEQLNHLRALPNFYAFRPSDAFENTACMQIALSLNAPSGLILSRQNLPVLDEVSKERVLKGAYVKHHSKDPIITLVASGSEVSLALESAKILERENIQTQVISAPCFDLLIEQDESYLKELFKGKVLVIEASRAIEWYRFADKIIGMDSFGSSAKGDKLFEKFGFSVENITAQAKRLLNA

SEQ ID NO: 11396 - protein, 858 aa, Helicobacter pylori
MQPMKSKKLYLALIIGVLLAFLTLSSWLGNSGLVGRFGVWFAALNKKYFGHLSFINLPYLAWVLFLLYKTKNPFTEIVLEKTLGHLLGILSLLFLQSSLLNQGEIGNSARLFLRPFIGDFGLYALITLMVVISYLILFKLPPKSVFYPYMNKTQNLLKEIYKQCLQAFSPNFSPKKEGFENTPSDIQKKETKNDKEKENRKENPINENHKTPNEEPFLAIPTPYNTTLNDSEPQEGLVQISSHPPTHYTIYPKRNRFDDLTNPTNPPLKEIKQETKEREPTPTKETLTPTTPKPIMPTLAPIIENDNKTENQKTPNHPKKEENPQENTQEEMIEGRIEEMIKENLKKEEKEVQNAPNFSPVTPTSAKKPVMVKELSENKEILDGLDYGEVQKPKDYELPTTQLLNAVCLKDTSLDENEIDQKIQDLLSKLRTFKIDGDIIRTYSGPIVTTFEFRPAPNVKVSRILGLSDDLAMTLCAESIRIQAPIKGKDVVGIEIPNSQSQIIYLREILESELFQKSSSPLTLALGKDIVGNPFITDLKKLPHLLIAGTTGSGKSVGVNAMILSLLYKNPPDQLKLVMIDPKMVEFSIYADIPHLLTPIITDPKKAIGALQSVAKEMERRYSLMSEYKVKTIDSYNEQAPSNGVEAFPYLIVVIDELADLMMTGGKEAEFPIARIAQMGRASGLHLIVATQRPSVDVVTGLIKTNLPSRVSFRVGTKIDSKVILDTDGAQSLLGRGDMLFTPPGANGLVRLHAPFATEDEIKKIVDFIKAQKEVQYDKDFLLEESRMPLDTPNYQGDDILERAKAVILEKKITSTSFLQRQLKIGYNQAATITDELEAQGFLSPRNAKGNREILQNF

SEQ ID NO: 11397 - protein, 608 aa, Helicobacter pylori
MPKHSLEQIKEKITERSKKTRELYLENIFNPKNQPKIESLGCANIAHVTASMPEHLKMPLGSHKRKHFAIITAYNDMLSAHQPFKNYPDLIKKELQEHNAYASVASGVPAMCDGITQGYDGMELSLFSRDVIALSTAVGLSHNVFDGAFFLGVCDKIVPGLLIGALSFGNLASVFVPSGPMVSGIENYKKAKARQDFAMGKINREELLKVEMQSYHDVGTCTFYGTANSNQMMMEFMGLHVANSSFINPNNPLRKVLVEESAKRLASGKVLPLAKLIDEKSILNALIGLMATGGSTNHTLHLIAIARSCGVILNWDDFDAVSNLIPLLAKVYPNGSADVNAFEACGGLVFVIKELLKEGLLFEDTHTIMDTETQKGMQNYTKTPFLENNQLVYKDAINHSLNTDILRPVSDPFAANGGLKILKGNLGRAVIKISAIKDEHRKVKARAIVFKTQSEFLERFKNKELERDFVAVLPFQGPKSNGMPELHKLTTNLGALQDMGYKVALVTDGRMSGASGKVPSAIHLSPEGALNGAIIKIKDGDLIELDAPNNALNVLEKDFEKRGINPLFLETLENLEKPSFGLGRELFTSLRLNVNTAEEGGMSFGIKV

SEQ ID NO: 11398 - protein, 425 aa, Helicobacter pylori
MLDFDLVLFGATGDLAMRKLFVSLYEIYTHYGFKNDSRIIASGRKELSNEEFLTLLCEKTQLHSREKGREFLAHISYLCVRLDNPKDFEELSKIATKNKPLIFYFSISPSFFATTAQHLAKNALNHANTRLILEKPLGHDLKTCKEIFQSISVFFKEEQIFRIDHYLGKKGVQNILELRLNNPILNILWDQISAVEICVYETLGVEERGEFYDKIGALRDMVQNHLLQVLSLIATDLPNNLKDLRKEKIKVLKTLQPPKDFKKQVIRAQYQGYRDENKVHKESQTETFVAIKAFLDTPKFKGVPFYLKHAKKMPHNQASVKIHFNAVNTLEFFLSQDKITLTLKDHQNPLILETHNKQEFLRPYAKLLYDAIQNNHNNFAHQLELEASWVFIDTLIEGFMNNATPLYSYESHHLNESEFLKPLYQ

SEQ ID NO: 11399 - protein, 440 aa, Helicobacter pylori
MLERYANEEMKALWNEQTKFETYLEVEKAVVRAWNKLGQIQDSDCEKICAKAAFNLERIKEIEKTTKHDLIAFTTCVAESLGEESRFFHYGITSSDCIDTAMALLMTKSLKLIQKGVKNLYETLKNRALEHKDTLMVGRSHGVFGEPITFGLVLALFADEIKRHLKALDLTMEFISVGAISGAMGNFAHAPLELEELACEFLGLKTANISNQVIQRDRYARLACDLALLASSCEKIAVNIRHLQRSEVYEVEEAFSTGQKGSSAMPHKRNPILSENITGLCRVIRSFTTPMLENVALWHERDMSHSSVERFALPDLFITSDFMLSRLNSVIKNLVVYPKNMLKNLALSGGLVFSQRVLLELPKKGLSREESYSIVQENAMKIWEVLQQGAFKNTDENLFLNALLNDERLKKYLSEDEIKACFDYNYYTKNVGAIFKRVFE

SEQ ID NO: 11400 - protein, 503 aa, Helicobacter pylori
MSQLKLEEISSVIEEKIKNFELDCDMAEVGKVVSYADGVAKVYGLNGVMSYEVLEFETGDKGVAANLEEDSVGVIVFGFGNNIKEGTSVKRTKSLMKVPVGDAVVGRVLNALGEPIDGKGEIETNEFSLIEQKAPGIMDRKSVHEPLQTGIKAIDALVPIGRGQRELIIGDKQTGKTTVAIDAIINQKGQNVICIYVAIGQKESTVAQVVRKLEEYGAMEYSVVINASASDSAAMQYLAPYSGVAMGEYFRDHARHALIIYDDLSKHAVAYREISLILRRPPGREAFPGDVFYIHSRLLERAAKLCDEKGAGSLTALPIVETQAGDVSAYIPTNIISITDGQIFLETDLFYSGIRPAINVGLSVSRVGGAAQIKATKQVSGTLRLDLAQYRELQAFTQFASDLDEASKKQLERGQRMVEVLKQAPYSPLPIEKQVVIIYAGAKGFLDSVSVKKVVDFEEQLHPFLEAKYPQVLEEIHTKKALDKDLEAMLRKVLEEFKLTYSE

SEQ ID NO: 11401 - protein, 118 aa, Helicobacter pylori
MKNRYIQQFEDAQLKDKTMPAFKAGDTLRLGITIKEGEKTRTQYFEGVCIAIRGNGVDKTFCVRKIGANNIGVEKIFPFYSESLASVEVLRVGRVRRAKLYYLRDRRGKAARIKEVRH

SEQ ID NO: 11402 - protein, 229 aa, Helicobacter pylori
MKFSVLTLFPQLVWPYFEDSILKRALEKNLFELEVLNLRDFSANKYQKADHTLIGGGAGQILDPEMVENALHSVKNPKHTIFLSAVGKPFKQTDAMRLAQKKHVVLVCGRYEGFDERSIELGADEVFCIGDFILTGGELGALCLIDSIARHIQGVLGNAQSLENESFENHYLEAPNFANAVFKSKEINKIPAPLEYSKGNHAKIKQLKLDLSKLRTKFYRLDLFKQHKS

SEQ ID NO: 11403 - protein, 76 aa, Helicobacter pylori
MTVIRLTRIGRKKKPFYRVVVTDSRKRRDGGWIESIGYYNPLSEPKDIKIDKERLNYWKGVGAKMSERVEKLSQKA

SEQ ID NO: 11404 - protein, 248 aa, Helicobacter pylori
MSVILETKGLKKTYQNHLVLDGINFTLNKGEVAVILGPSGCGKSTFLKCLNGLEKINEGEILFENTNLNNKATNWNQMRQKIGMVFQNYELFPHLNVLDNILLAPMKVQKRSKDEVISQAIELLKRVGLEHKQQAYPKELSGGQKQRVAIVRSLCMRPKIMLFDEVTASLDPEMVKEVLEVILELATTGMSMVIVTHEMKFAQKIAHKIVFFDSGKIAEENNAKEFFNHPKSQRAQKFLETFHFLGSC

SEQ ID NO: 11405 - protein, 418 aa, Helicobacter pylori
MIFSSLFSVVGMAVLFLIAWVFSSNKRAINYRTIVSAFVIQVALGALALYVPLGREMLQGLASGIQSVISYGYEGVRFLFGNLAPNAKGDQGIGGFVFAINVLAIIIFFASLISLLYYLKIMPLFINLIGGALQKCLGTSRAESMSAAANIFVAHTEAPLVIKPYLKSMSDSEIFAVMCVGMASVAGPVLAGYASMGIPLPYLIAASFMSAPGGLLFAKIIYPQNETISSHADVSIEKHVNAIEAIANGASTGLNLALHVGAMLLAFVGMLALINGLLGVVGGFLGMEHLSLGLILGTLLKPLAFMLGIPWSQAGIAGEIIGIKIALNEFVGYMQLLPYLGDNPPLILSEKTKAIITFALCGFANLSSVAMLIGGLGSLVPKKKDLIVRLALKAVLVGTLSNFMSATIAGLFIGLNAH

SEQ ID NO: 11406 - protein, 442 aa, Helicobacter pylori
MITPKVLSGFKDRLPKDAIQKAQLLAKVSVVFQSFGFVPIETPHLEYAQTLLPDASSDIQKEIYRFKDHGDRDVALRFDLTVPLARFVSLHHQTLGMPFKRYAIGNVFRGERAQKGRYREFTQCDFDFIGSESLVCDAEIIQVIVASLKALDLEDFCVSINHRKILNGICEYFGISQVNEALRIVDKLEKIGLNGVEEELKKECGLNSNTIKELLELIQIKQNDLSHAEFFEKIAYLKDYNENLKKGIQDLERLYQLLGDLQISQNLYKIDFSIARGLGYYTGIVYETTLNEMKSLGSVCSGGRYDHLTKNFSKENLQGVGASIGIDRLIVALSEMQLLDERSTQAKVLIACMHEEYFSYANRLAESLRQSGIFSEVYPEAQKIKKPFSYANHKGHEFVAVIGEEEFKSETLSLKNMHSGMQLNCLSFLKALEIIGENDEDL

SEQ ID NO: 11407 - protein, 329 aa, Helicobacter pylori
MQQRHLGPLKVGALALGCMGMTYGYGEVHDKKQMVKLIHKALELGINFFDTAEAYGEDNEKLLGEAIKPFKDKVVVASKFGIYYADPNDKYATMFLDSSPNRIKSAIEGSLKRLKVECIDLYYQHRMDTNTPIGEVAEVMQLLIKEGKIKAWGMSEAGLSSIQKAHQICPLSALQSEYSLWWREPEKEILGFLEKEKIGFVAFSPLGKGFLGAKFEKNATFASEDFRSVSPRFNQENLAKNYALVELIQDHAHAKGVTPAQLALSWILHTQKIIVPLFGTTKESRLIENIGALQVSWSQKELEIFQKELTAIKIEGARYPERINEMVNQ

SEQ ID NO: 11408 - protein, 155 aa, Helicobacter pylori
MRRRKAPVREVLGDPVYGNKVVTKFINKMMFDGKKSVAEKIIYKAFNKIEEKSGEKGIEVFEKALERVRPLVEVRSRRVGGATYQVPVEVRASRQQSLSIRWILEATRKRNERMMVDRLANELMDAASDKGAAFKKKEDVHKMAEANKAFAHYRW

SEQ ID NO: 11409 - protein, 135 aa, Helicobacter pylori
MPTINQLIRKERKKVVKKTKSPALVECPQRRGVCTRVYTTTPKKPNSALRKVAKVRLTSKFEVISYIPGEGHNLQEHSIVLVRGGRVKDLPGVKYHIVRGALDTAGVNKRTVSRSKYGTKKAKATDKKATDNKKK

SEQ ID NO: 11410 - protein, 2890 aa, Helicobacter pylori
MSKKIPLKNRLRADFTKTPTDLEVPNLLLLQRDSYDSFLYSKEGKESGIEKVFKSIFPIQDEHNRITLEYAGCEFGKSKYTVREAMERGITYSIPLKIKVRLILWEKDTKSGEKNGIKDIKEQSIFIREIPLMTERTSFIINGVERVVVNQLHRSPGVIFKEEESSTSLNKLIYTGQIIPDRGSWLYFEYDSKDVLYARINKRRKVPVTILFRAMDYQKQDIIKMFYPLVKVRYENDKYLIPFASLDANQRMEFDLKDPQGKVILLAGKKLTSRKIKELKENHLEWVEYPMDILLNRHLAEPVMVGKEVLLDMLTQLDKNKLEKIHDLGVQEFVIINDLALGHDASIIQSFSADSESLKLLKQTEKIDDENALAAIRIHKVMKPGDPVTTEVAKQFVKKLFFDPERYDLTMVGRMKMNHKLGLHVPDYITTLTHEDIITTVKYLMKIKNNQGKIDDRDHLGNRRIRAVGELLANELHSGLVKMQKTIKDKLTTMSGAFDSLMPHDLVNSKMITSTIMEFFMGGQLSQFMDQTNPLSEVTHKRRLSALGEGGLVKDRVGFEARDVHPTHYGRICPIETPEGQNIGLINTLSTFTRVNDLGFIEAPYKKVVDGKVVGETIYLTAIQEDSHIIAPASTPIDEEGNILGDLIETRVEGEIVLNEKSKVTLMDLSSSMLVGVAASLIPFLEHDDANRALMGTNMQRQAVPLLRSDAPIVGTGIEKIIARDSWGAIKANRAGVVEKIDSKNIYILGESKEEAYIDAYSLQKNLRTNQNTSFNQVPIVKVGDKVGAGQIIADGPSMDRGELALGKNVRVAFMPWNGYNFEDAIVVSECITKDDIFTSTHIYEKEVDARELKHGVEEFTADIPDVKEEALAHLDESGIVKVGTYVSAGMILVGKTSPKGEIKSTPEERLLRAIFGDKAGHVVNKSLYCPPSLEGTVIDVKVFTKKGYEKDARVLSAYEEEKAKLDMEHFDRLTMLNREELLRVSSLLSQAILEEPFSHNGKDYKEGDQIPKEEIASINRFTLASLVKKYSKEVQNHYEITKNNFLEQKKVLGEEHEEKLSILEKDDILPNGVIKKVKLYIATKRKLKVGDKMAGRHGNKGIVSNIVPVADMPYTADGEPVDIVLNPLGVPSRMNIGQILEMHLGLVGKEFGKQIARMLEDKTKDFAKELRAKMLEIANAINEKDPLTIHALENCSDEELLEYAKDWSKGVKMAIPVFEGISQEKFYKLFELAKIAMDGKMDLYDGRTGEKMRERVNVGYMYMIKLHHLVDEKVHARSTGPYSLVTHQPVGGKALFGGQRFGEMEVWALEAYGAAHTLKEMLTIKSDDIRGRENAYRAIAKGEQVGESEIPETFYVLTKELQSLALDINIFGDDVDEDGAPKPIVIKEDDRPKDFSSFQLTLASPEKIHSWSYGEVKKPETINYRTLKPERDGLFCMKIFGPTKDYECLCGKYKKPRFKDIGTCEKCGVAITHSKVRRFRMGHIELATPVAHIWYVNSLPSRIGTLLGVKMKDLERVLYYEAYIVKEPGEAAYDNEGTKLVMKYDILNEEQYQNISRRYEDRGFVAQMGGEAIKDLLEEIDLITLLQSLKEEVKDTNSDAKKKKLIKRLKVVESFLNSGNRPEWMMLTVLPVLPPDLRPLVALDGGKFAVSDVNELYRRVINRNQRLKRLMELGAPEIIVRNEKRMLQEAVDVLFDNGRSTNAVKGANKRPLKSLSEIIKGKQGRFRQNLLGKRVDFSGRSVIVVGPNLKMDECGLPKNMALELFKPHLLSKLEERGYATTLKQAKRMIEQKSNEVWECLQEITEGYPVLLNRAPTLHKQSIQAFHPKLIDGKAIQLHPLVCSAFNADFDGDQMAVHVPLSQEAIAECKVLMLSSMNILLPASGKAVAIPSQDMVLGLYYLSLEKSGVKGEHKLFSSVNEIITAIDTKELDIHAKIRVLDQGNIIATSAGRMIIKSILPDFIPTDLWNRPMKKKDIGVLVDYVHKVGGIGITATFLDNLKTLGFRYATKAGISISMEDIITPKDKQKMVEKAKVEVKKIQQQYDQGLLTDQERYNKIIDTWTEVNDKMSKEMMTAIAQDKEGFNSIYMMADSGARGSAAQIRQLSAMRGLMTKPDGSIIETPIISNFKEGLNVLEYFNSTHGARKGLADTALKTANAGYLTRKLIDVSQNVKVVSDDCGTHEGIEITDIAVGSELIEPLEERIFGRVLLEDVIDPITNEILLYADTLIDEEGAKKVVEAGIKSITIRTPVTCKAPKGVCAKCYGLNLGEGKMSYPGEAVGVVAAQSIGEPGTQLTLRTFHVGGTASRSQDEREIVASKEGFVRFYNLRTYTNKEGKNIIANRRNASILVVEPKIKAPFDGELRIETVYEEVVVSVKNGDQEAKFVLRRSDIVKPSELAGVGGKIEGKVYLPYASGHKVHKGGSIADIIQEGWNVPNRIPYASELLVKDNDPIAQDVYAKEKGVIKYYVLEANHLERTHGIKKGDMVSEKGLFAVIADDNGREAARHYIARGSEILIDDNSEVSTNSVISKPTTNTFKTIATWDPYNTPIIADFKGKVGFVDVIAGVTVAEKEDENTGITSLVVNDYIPSGYKPSLFLEGANGEEMRYFLEPKTSIAISDGSSVEQAEVLAKIPKATVKSRDITGGLPRVSELFEARKPKPKDVAILSEVDGIVSFGKPIRNKEHIIVTSKDGRSMDYFVDKGKQILVHADEFVHAGEAMTDGVISSHDILRISGEKELYKYIVSEVQQVYRRQGVSIADKHIEIIVSQMLRQVRILDSGDSKFIEGDLVSKKLFKEENARVIALKGEPAIAEPVLLGITRAAIGSDSIISAASFQETTKVLTEASIAMKKDFLEDLKENVVLGRMIPVGTGMYKNKKIVLRALEDNSKF

SEQ ID NO: 11411 - protein, 164 aa, Helicobacter pylori
MQKQHQRQHKVELVANLKSQFADAKALLICDYKGLSVRKLEALRNKARNQGIKVQVIKNTLAHIAMKETGYSDLDLKETNVFLWGGDQIALSKLVFDFQKEHKDHFVLKAGLFDKESVSVAHVEAVSKLPSKEELMGMLLSVWTAPARYFVTGLDNLRKAKEEN

SEQ ID NO: 11412 - protein, 234 aa, Helicobacter pylori
MAKKVFKRLEKLFSKIQNDKAYGVEQGVEVVKSLASAKFDETVEVALRLGVDPRHADQMVRGAVVLPHGTGKKVRVAVFAKDIKQDEAKNAGADVVGGDDLAEEIKNGRIDFDMVIATPDMMAVVGKVGRILGPKGLMPNPKTGTVTMDIAKAVSNAKSGQVNFRVDKKGNVHAPIGKASFPEEKIKENMLELVKTINRLKPSSAKGKYIRNAALSLTMSPSVSLDAQELMDIK

SEQ ID NO: 11413 - protein, 141 aa, Helicobacter pylori
MAKKVVGEIKLQIPAGKANPSPPVGPALGQRGVNIMEFCKAFNERTKDMGSFNIPVIITVYQDKSFTFITKKPPVTDLIKKASGVEKGSDNPLKNKIAKLTHKQVEEIAQLKMEDLNTSTMEAAKKIVMGSARSMGVEVVD

SEQ ID NO: 11414 - protein, 176 aa, Helicobacter pylori
MMDWYAIQTYSGSEQSVKKAIENLANDHNIRDRIQEIIVPTEDIIEVSKKSKTKVTERSLYPGYVFIKVDLDTVLWHKIQSLPRVSRFIGENKKPTPLSEADIGHILEKMNNRAAPKPKIFFEQGEVVRVVEGPFANFTATVEEYDVEHRKLKLNVSIFGRNTPIEILHSQVEKII

SEQ ID NO: 11415 - protein, 399 aa, Helicobacter pylori
MAKEKFNRTKPHVNIGTIGHVDHGKTTLSAAISAVLSLKGLAEMKDYDNIDNAPEEKERGITIATSHIEYETENRHYAHVDCPGHADYVKNMITGAAQMDGAILVVSAADGPMPQTREHILLSRQVGVPHIVVFLNKQDMVDDQELLELVEMEVRELLSAYEFPGDDTPIVAGSALRALEEAKAGNVGEWGEKVLKLMAEVDAYIPTPERDTEKTFLMPVEDVFSIAGRGTVVTGRIERGVVKVGDEVEIVGIRPTQKTTVTGVEMFRKELEKGEAGDNVGVLLRGTKKEEVERGMVLCKPGSITPHKKFEGEIYVLSKEEGGRHTPFFTNYRPQFYVRTTDVTGSITLPEGVEMVMPGDNVKITVELISPVALELGTKFAIREGGRTVGAGVVSNIIE

SEQ ID NO: 11416 - protein, 688 aa, Helicobacter pylori
MDFITINSSNKTEEFALKQVAKQATSSLLYRLGKTIILASVCVEREPVSEDFLPLVVQFLEKSYAAGKIPGGFVKREGRAQDFEILTSRLIDRTLRPLFPKDYRYPTQITLMVLSHDIENDLQVSALNAASAALFLAHIAPIKSVSACRIARMDNEFIINPSASLLNQSSLDLFVSGTKESLNMIEMRSLGQKLNALEEPLMLEALELAQKSLEETCTLYEEIFTPHQNELFFKESQGIVFNERLLDLLKNQYFDEIIKGIESSALSERENVFNEIARKISEAHSEFSLEEIELSLEKVKKTEIRRMIIKDKIRPDKRALEEVRPILIESDLLPMAHSSILFTRGQTQSLVVGVLGTDNDAQTHESLEHKAPIKERFMFHYNFPPFCVGEASSIGAASRRELGHGNLAKRALETSIKNKEQVIRLVSEILESNGSSSMASVCAGSLALYASGVEIYDLVAGVAMGMVSEGQDHAILSDISGLEDAEGDMDFKIAGNLEGITAMQMDTKMSGIKLEILYQALLQAKEARKHILKIMHEAKEKIVINFSHLPTTEIFNVAPDKIVEIIGQGGRVIKEIVEKFEVKIDLNKPSGEVKIMGNKERVLKTKEFILNYLHSLDQELEQYAIDEVLEAQVKRIVDFGAFLSLPKGGEGLLRKQNMDKCQVVLKEGDSIRCRVISFNKGKIALDLA

SEQ ID NO: 11417 - protein, 234 aa, Helicobacter pylori
MDNTLKHLAIIMDGNGRWAKLKNKARAYGHKKGVKTLKDITIWCANHKLECLTLYAFSTENWKRPKSEVDFLMKMLKKYLKDERSTYLNNNIRFRAIGDLEGFSKELRDTILQLENDTRHFKDFTQVLALNYGSKNELSRAFKSLLESPPSHINLLESLENEISNRLDTHDLPEVDLLLRTGGEMRLSNFLLWQSSYAELFFTPILWPDFTPKDLENIISDFYKRVRKFGELKC

SEQ ID NO: 11418 - protein, 380 aa, Helicobacter pylori
MIVKRLNPDALKNALQKIGPEKIAQDRMHQKGVSFVFEIQHLPLSATLILKQEAISVGGDFATPRDCILAKEPFYDGVLIASAKQLERLIVKCHSQPFGLKHLAQELKSHLKAPKPNTPQIMAVLNLTPDSFYEKSRFDSKKALEEIYQWLEKGITLIDIGAASSRPESEIIDPKIEQDRLKEILLEIKSQKLYQCAKFSIDTYHATTAQMALEHYFSILNDVSGFNSAEMLEVAKDYKPTCILMHTQKTPKDMQENVFYHNLFDEMDRFFKEKLEVLEKYVLQDIILDIGFGFAKLKEHNLALIKHLSHFLKFKKPLLVGASRKNTIGLITGREVQDRLAGTLSLHLMALQNGASVLRVHDIDEHIDLIKVFKSLEETD

SEQ ID NO: 11419 - protein, 847 aa, Helicobacter pylori
MDIRNEFLQFFQNKGHAVYPSMPLVPNDATLLFTNAGMVQFKDIFTGIVPRPSIPRAASSQLCMRAGGKHNDLENVGYTARHHTLFEMLGNFSFGDYFKEEAILFAWEFVTKNLGFKPKDLYISVHEKDDEAVKLWEKFVPVDRIKKMGDKDNFWQMGDSGPCGPCSEIYIDQGEKHFKGSEDYFGGEGDRFLEIWNLVFMQYERSNDGVLSPLPKPSIDTGMGLERVQALLEHKLNNFDSSLFAPLMEEISELTSLDYASEFQPSFRVVADHARAVAFLLAQGVHFNKEGRGYVLRRILRRALRHGYLMGLKEAFLYKVVGVVCEQFANTHAYLKESKEMVVKECFEEEEHFLETLESGMELFNLSLKHLNENKIFDGKIAFKLYDTFGFPLDLTNDMLRSHGACADMQGFELCMQEQVKRSKASWKGKQNNADFSAILNAYAPNVFVGYETTECSAKVLGFFDSDFKEITDANPNQEVWVLLEKTPFYAEGGGAIGDRGALFKDNGEVAIVLDTKNFFGLNFSLLEIKKALKKGDQVIAQVSDERFEIAKHHSATHLLQSALREVLGSHVSQAGSLVESKRLRFDFSHAKALNDEELEKVEDLVNAQIFKHLNSQVEHMPLNQAKDKGALALFSEKYAENVRVVSFKEASIELCGGIHVENTGLIGGFRIVKESGVSSGVRRIEAVCGKAFYQLAKEENKELKNAKTLLKNNDVIAGINKLKESVKNSQKAPVSMDLPVEKIHGVNLVVGVVEQGDIKEMIDRLKSKHERLLAMVFKKENERITLACGVKNAPIKANVWANEVAQILGGKGGGRGDFASAGGKDIENLQAALNLAKNTALKALEG

SEQ ID NO: 11420 - protein, 85 aa, Helicobacter pylori
MERKRYSKRYCKYTEAKISFIDYKDLDMLKHTLSERYKIMPRRLTGNSKKWQERVEVAIKRARHMALIPYIVDRKKVVDSPFKQH

SEQ ID NO: 11421 - protein, 142 aa, Helicobacter pylori
MRHYETMFILKPTLVEEEIKSKIEFYKEVITKHHGVIETSLDMGMRNLAYEIKKHKRGYYYVAYFKAEPSMIVELERLYRINEDVLRFIVIKYESKKEVEAWHALVDRANKKPSHAKEKHEKTEHTHSHHTEEAESVGSHSE

SEQ ID NO: 11422 - protein, 339 aa, Helicobacter pylori
MVTITLTKTTRNNMHKKRVFSGIQPTGQIHLGNYLGAIKHWVEMQDEYENLFCVVNSHAITLPIDPAFLKSQSYELVKLLLACGIDPKQSGLFIQSEVDEHPALAWLLNCQVSMGEMQRMTQFKDKSLKNPKSVNVGLFNYPILMASDILLYQSDLVPVGEDQKQHLELTRNIAEKFNRDFGNCFKVPEPLIAKVGARVMGLDDPKVKMSKSHQGANHAIFLLDEPDIIVKKIKKAATDSMGVIAFDEKREGIFNLLNIYMLLSNESPENIEERFKNKGYGDFKKELAEVMIQALKPIQERYKEISDDEVKAILNGGAEKARPLARATYQKAKELMGLI

SEQ ID NO: 11423 - protein, 185 aa, Helicobacter pylori
MLQAIYNETKDLMQKSIQALNRDFSTLRSAKVSVNILDHIKVDYYGTPTALNQVGSVMSLDATTLQISPWEKNLLKEIERSIQEANIGVNPNNDGETIKLFFPPMTSEQRKLIAKDAKAMGEKAKVAVRNIRQDANNQVKKLEKDKEISEDESKKAQEQIQKITDEAIKKIDESVKNKEDAILKV

SEQ ID NO: 11424 - protein, 182 aa, Helicobacter pylori
MKKALISTLFGVSLAFAKPYTIDKANSSVWFEVKHFTFNETRGAFDNFDGKIDLEPNTKMLSVFEGNIDVKSVNTRDRKRDNHLKTADFFDVVKYPKGSFKMTKYEDGKIYGDLTLRGVTKPVVLEAKIQAPLQNPMNKKEFMVLQAEGKINRKDFGIGKTFSDAVVGDEVKIELKLEAYAQ

SEQ ID NO: 11425 - protein, 208 aa, Helicobacter pylori
MARYRGAVERLERRFGVSLALKGERRLSGKSALDKRAYGPGQHGQRRAKTSDYGLQLKEKQKAKMMYGISEKQFRSIFVEANRLDGNTGENLIRLIERRLDNVVYRMGFATTRSSARQLVTHGHVLVDGKRLDIPSYFVRSGQKIEIKEKTKSNSQVVRAMELTAQTGIVPWIDVEKDKKYGIFTRYPEREEVVVPIEERLIVELYSK

SEQ ID NO: 11426 - protein, 131 aa, Helicobacter pylori
MAKRNVTAKKKVVKKNIARGVVYISATFNNTNITITDEMGNVICWSTAGGLGFKGSKKSTPYAAQQAVESALSKAKEHGVKEVGIKVQGPGSGRETAIKSVGATEGIKVLWIKDITPLPHNGCRPPKRRRV

SEQ ID NO: 11427 - protein, 120 aa, Helicobacter pylori
MARIAGVDLPKKKRVEYALTYIYGIGLKSSREILEAVGISFDKRVHELSEDEVSSIAKKIQQSYLVEGDLRKKVQMDIKSLMDLGNYRGIRHRKGLPVRGQTTKNNARTRKGKKKTVGSK

SEQ ID NO: 11428 - protein, 37 aa, Helicobacter pylori
MKVRPSVKKMCDNCKIIKRRGVIRVICATPKHKQRQG

SEQ ID NO: 11429 - protein, 72 aa, Helicobacter pylori
MARDDVIEVDGKVIEALPNATFKVELDNKHVVLCRISGKMRMHYIRIALGDRVKLELTPYSLDKGRITFRYK

SEQ ID NO: 11430 - protein, 420 aa, Helicobacter pylori
MNKAIASKILITLGFLFLYRVLAYIPIPGVDLAAIKAFFDSNSNNALGLFNMFSGNAVSRLSIISLGIMPYITSSIIMELLSATFPNLAKMKKERDGMQKYMQIVRYLTILITLIQAVSVSVGLRSISGGANGAIMIDMQVFMIVSAFSMLTGTMLLMWIGEQITQRGVGNGISLIIFAGIVSGIPSAISGTFNLVNTGVINILMLIGIVLIVLATIFAIIYVELAERRIPISYARKVVMQNQNKRIMNYIPIKLNLSGVIPPIFASALLVFPSTILQQATSNKTLQAVADFLSPQGYAYNILMFLLIIFFAYFYSSIVFNSKDIADNLRRNGGYIPGLRPGEGTSSFLNSVASKLTLWGSLYLALISTVPWILVKAMGVPFYFGGTAVLIVVQVAIDTMKKIEAQIYMSKYKTLSAVGF

SEQ ID NO: 11431 - protein, 135 aa, Helicobacter pylori
MIMGLENLKPAKGSVKKIKRVGRGQGSGMGKTATRGGKGQTARTGYKAKRGFEGGQQPLQRRLPKIGFRTKDSHIYSINVEKNEAIKNLEEITFSSLRALHHFPLYIEGVKLIGKDAKNLASKIKDERIKTSGQK

SEQ ID NO: 11432 - protein, 153 aa, Helicobacter pylori
MTERKGMEEINREEFQEVVVNIGRVTKVVKGGRRFRFNALVVVGNKNGLVGFGLGKAKEVPDAIKKAVDDAFKNLIHVTIKGTTIAHDIEHKYNASRILLKPASEGTGVIAGGSTRPIVELAGIKDILTKSLGSNNPYNVVRATFDALAKIKA

SEQ ID NO: 11433 - protein, 119 aa, Helicobacter pylori
MMNAKALYKKKALRDRRKLRIKSKLLGDALRPRVSVFRSNRYFYAQAIDDVKQSTITHIDGRKMGFKNTQEDAKKLGALFAEELKKAGIERAVYDRNGYLYHGVVAAFAESLRENGIAL

SEQ ID NO: 11434 - protein, 178 aa, Helicobacter pylori
MSRIGKRIIEIPSSVQASVEGSKLLFKNSKEKHELETHNRVKITLENNQLSFQPVGEDAQSRAYWGTYGALANNIVIGLSTGFSKTLEVNGVGYKVALGNKTLDLSLGFSHPVKYPIPAGIEMVVEKNTITIKGSDKQKVGQVAAEIRSFRPPEPYKGKGVKYSDEVIIRKAGKTAKK

SEQ ID NO: 11435 - protein, 131 aa, Helicobacter pylori
MVNDIIADSLTRLRNASMRRLEFTQLYYAKIVVSILEIFKEKGFIKDFNVKDKDKKQSVYVQLAYDEKGHSKISEVKRLSKPGRRVYKQKNELKRFKNGYGVIVVSTSKGVITNEEAYRQNVGGEVLCSIW

SEQ ID NO: 11436 - protein, 122 aa, Helicobacter pylori
MIQSFTRLNVADNSGAKEIMCIKVLGGSHKRYASVGSVIVASVKKAIPNGKVKRGQVVKAVVVRTKKEIQRKNGSLVRFDDNAAVILDAKKDPVGTRIFGPVSREVRYANFMKIISLAPEVV

SEQ ID NO: 11437 - protein, 86 aa, Helicobacter pylori
MNTKEPHKRLVQGKVISKFAEKSAVILVERKVVHEKYRKIVKKFKKYTIHDENNQVKVGDFVSAIECRPLSKTKSFTLKEILVVGV

SEQ ID NO: 11438 - protein, 66 aa, Helicobacter pylori
MKYTELKDKSIKELEELLHAKKAELFELRVKLKAMQLSNPNEIKKARRNIARINTAINAHYSSSVE

SEQ ID NO: 11439 - protein, 141 aa, Helicobacter pylori
MLMPKRTKYRKQMKGRNRGKAHRGNSIAFGDIAIKAIEHGRIDSRQIESARVAMTRHIKRAGKVWIRVFPDKPLTAKPLETRMGKGKGSVEKWVMNIKPGRIVYEMLGIEEGLAREALALAQSKLPFKTKIVTCESENEIY

SEQ ID NO: 11440 - protein, 122 aa, Helicobacter pylori
MSKALLRFVRLSPTKARLIARQIQGMNAELAIASLEFTPNKAARVLSKVVASAVANGSLDAKSALIVSCRVDAGPVLRRSIPRAKGRATAIRKPTSHVFVEVAEGKEMKSSKSHKKNQAEGK

SEQ ID NO: 11441 - protein, 276 aa, Helicobacter pylori
MAIKTYKPYTPSRRFMSVLDSKDITAKSSVKGLLTKLKATAGRNNNGRITSRHKERGAKKLYRIIDFKRNKYNIEGKVAAIEYDPYRNARIALVVYPDGDKRYILQPSGLKVGDSVIAAEGGLDIKVGFAMKLKNIPIGTVVHNIEMHPGAGGQLARSAGMSAQIMGRENKYTIIRMPSSEMRYILSECMASVGVVGNEDFINVSIGKAGRNRHRGIRPQTRGSAMNPVDHPHGGGEGKTGTSGHPVSPWGTPAKGYKTRKKKASDKLIISRKKHK

SEQ ID NO: 11442 - protein, 191 aa, Helicobacter pylori
MEFLVQKIGMSRTIDANSTPVTLLKVLQAKVCQLENGKALVAYAMHKKHNKAIEGQQKKYQLSKEFNHFATLKASQQKELGDLDLSALETLKRVKASFKTKGRGFAGVMKRWNFQGGPAAHGSRFHRRPGSIGNREWPGRVQKGRKMAGHYGNELVTCQNEVLSFDKESMVLVLKGSVAGFSGAYGRIRAV

SEQ ID NO: 11443 - protein, 104 aa, Helicobacter pylori
MEKIRLKLKAYDHRVLDRSVVAIVEAVKRSGSEIRGPIPLPTKNKRYTVLRSPHVNKDSREQFEIRVYSRLIDIISATPETVDSLMKLDLAPEVDVEVTSMETK

SEQ ID NO: 11444 - protein, 488 aa, Helicobacter pylori
MDHLKHLQQLQNIERIVLSGIVLANHKIEEVHSVLEPSDFYYPPNGLFFEIALKLHEEDCPIDENFIRQKMPKDKQIKEEDLVAIFAASPIDNIEAYVEEIKNASIKRKLFGLANTIREQALESAQKSSDILGAVEREVYALLNGSTIEGFRNIKEVLESAMDLITENQRKGSLEVTGIPTGFVQLDNYTSGFNKGSLVIIGARPSMGKTSLMMNMVLSALNDDRGVAVFSLEMSAEQLALRALSDLTSINMHDLESGRLDDDQWENLAKCFDHLSQKKLFFYDKSYVRIEQIRLQLRKLKSQHKELGIAFIDYLQLMSGSKATKERHEQIAEISRELKTLARELEIPIIALVQLNRSLENRDDKRPILSDIKDSGGIEQDADIVLFLYRGYIYQMRAEDNKIDKLKKEGKIEEAQELYLKVNEERRIHKQNGSIEEAEIIVAKNRNGATGTVYTRFNAPFTRYEDMPIDSHLEEGQETKVDYDIVTT

SEQ ID NO: 11445 - protein, 166 aa, Helicobacter pylori
MSEPLETLDKDKQAMSEAIKKDIEKDKENLARVKADKKVKADESEKGYEKDDDKKAENLDKEIAKDKASPNDNELYEEDDRVKRDKERDDALRDKEKAKDDACMVRADDDTIEDDEEYGDDDKLRDEILGVMEELCDTLNDNLNFKKVVCMGGKVSIAFKFLIFCS

SEQ ID NO: 11446 - protein, 920 aa, Helicobacter pylori
MEEYKDTLNLNTTTFSMKGNLSVNEPKTYAKWQEQQAFKRMQARKDNHGDFTLHDGPPYANGHLHLGHALNKILKDIVVKREYFKGKKIYYTPGWDCHGLPIEQQILERLEKEKTSLENPTLFREKCRDHAKKFLEIQKNEFLQLGVLGDFEDPYKTMDFKFEASIYRALVEVAKKGLLKERHKPIYWSYACESALAEAEVEYKMKKSPSIFVAFGLKKESLEKLKVKKASLVIWTTTPWTLYANVAIALKKDAVYALTQKGYLVAKALHEKLAALGVVDNEITHEFNSNDLEYLVATNPLNQRDSLVALGEHVGLEDGTGAVHTAPGHGEEDYYLGLRYNLEVLMSVDEKGCYDEGIIHNQLLDESYLGEHVFKAQKRIIEQLGDSLLLEQEIEHSYPHCWRTHKPVIYRATTQWFILMDEPFIQNDGSQKTLREVALDAIEKVEFVPSSGKNRLKTMIENRPDWCLSRQRKWGVPLAFFIDKRTNKPCFESEVLEHVANLFEKKGCDVWWEYSVKDLLPPSYQEDAKHYEKIMHILDVWFDSGSTFKAVLEDYHGEKGQSPSDVILEGSDQHRGWFQSSLLIGCVLNNQAPFKKVITHGFIVDEKGEKMSKSKGNVVSLDKLLKTHGSDVVRLWVAFNDYQNDLRVSQTFFTQTEQHYKKFRNTLKFLLANFSDMDLKNLERPHNFSPLDHFMLETLETISAGVNSAFEEHDFVKGLNILMAFVTNELSGIYLDACKDSLYCDSKNNEKRQAIQMVLLATASKLCYFLAPILTHTIEEVLEHSQALRIFLQAKDVFDLKDISVSEKLHLKEFKKPENFEAVLALRSAFNEELDRLKKEGVIKNSLECAIEVKEKALDENLVEELLMVSFVGIAKEKLSETPAFTLFKAPFYKCPRCWRFKSELENTPCKRCEQVLKER

SEQ ID NO: 11447 - protein, 84 aa, Helicobacter pylori
MRIDKFLQSVGLVKRRVLATDMCNVGAVWLNGSCAKASKEVKAGDTISLHYLKGIEEYTILQIPALKNVPRKDTHLYIAPKTKE

SEQ ID NO: 11448 - protein, 689 aa, Helicobacter pylori
MTDNNQNNENHENSSENSKADEMRAGAFERFTNRKKRFRENAQKNAEYSNHEASSHHKKEHRPNKKPNNHHKQKHAKTRNYAQEELDSNKVEGVTEILHVNERGTLGFHKELKKGVEANNKIQVEHLNPHYKMNLNSKASVKITPLGGLGEIGGNMMVIETPKSAIVIDAGMSFPKEGLFGVDILIPDFSYLHQIKDKIAGIIITHAHEDHIGATPYLFKELQFPLYGTPLSLGLIGSKFDEHGLKKYRSYFKIVEKRCPISVGEFIIEWIHITHSIIDSSALAIQTKAGTIIHTGDFKIDHTPVDNLPTDLYRLAHYGEKGVMLLLSDSTNSHKSGTTPSESTIAPAFDTLFKEAQGRVIMSTFSSNIHRVYQAIQYGIKYNRKIAVIGRSMEKNLDIARELGYIHLPYQSFIEANEVAKYPDNEILIVTTGSQGETMSALYRMATDEHRHISIKPNDLVIISAKAIPGNEASVSAVLNFLIKKEAKVAYQEFDNIHVSGHAAQEEQKLMLRLIKPKFFLPVHGEYNHVARHKQTAISCGVPEKNIYLMEDGDQVEVGPAFIKKVGTIKSGKSYVDNQSNLSIDTSIVQQREEVASAGVFVATIFVNKNKQALLESSQFSSLGLVGFKDEKPLIKEIQGGLEVLLKSSNAEILNNPKKLEDHTRNFIRKALFKKFRKYPAIICHAHSF

SEQ ID NO: 11449 - protein, 44 aa, Helicobacter pylori
MKRTYQPHNTPRKRTHGFLVRMKTKNGRKVINARRAKGRKKLSV

SEQ ID NO: 11450 - protein, 461 aa, Helicobacter pylori
MKNTSSSTTLTMNDTIAAIATPLGKGAISIIKISGHNALNILKQLTQKQDFTPRYAYVHDIFSNGVLLDKALVIYFKAPYSFTGEDVCEIQCHGSPLLAQNILQACLNLGARLAKAGEFSKKAFLNHKMDLSEIEASVQLILCEDESVLNALARQLKGELKIFIEEARGNLLKLLASSEVLIDYSEEDIPSDFLDGVSLNLEKQIASFKDLLDFSNAQKQRNKGHALSIVGKPNAGKSSLLNAMLLEERALVSDIKGTTRDTIEEVIELKGHKVRLIDTAGIRESADKIERLGIEKSLKSLENCDIILGVFDLSKPLEKEDFNLIDTLNRAKKPCIVVLNKNDLAPKLELEILKSYLKIPYTLLETNTLNSKACLKDLSQKISAFFPKLDTQNKLLLTSLAQKIALENAITELQNAKNHLETLELFSYHILSAIENLNLLTRPYETSQMLDSMFSEFCLGK

SEQ ID NO: 11451 - protein, 1211 aa, Helicobacter pylori
MKENKAFTHLHLHTEYSLLDGANKIKILAKRVKELGMKSVSVTDHGNMFGAIDFYTSMKKEGIKPIIGMEAYIHNDDNLSSKETKQRFHLCLFAKNQEGYENLMFLSSMAYLEGFYYFPRINKKLLKEHSKGIIASSACLQGEVNYHLNTNNERNRKYGAKGYDEAKKIACEYQEIFEDDFYLEIMRHGILDQRFIDEQVIKMSLETGLKIIATNDTHYTMPNDAKAQEVAMCVAMGKTLNDKGRLKHSVHEFYIKSPEEMAKLFADIPEALENTQEIADKCVLEIDLKDDKKNPPTPPSFKFTKAYAQNEGLNFEDDASYFAYKAREGLKERLVLVPKEKHDQYKERLEKEIEVITNMKFPGYMLIVWDFIRYAKEMGIPVGPGRGSAAGSLVAFALKITDIDPLKYDLLFERFLNPERISMPDIDTDFCQRRRKEIIEYMIEKYGKYNVAQVITFNKMLAKGVIRDVARVLDMPYKEADDFAKLIPNRLGITLKGYEKNGEFIEGAWELEPKIKELVESNELAKQVWEYSLNLENLNRNAGVHAAALVVDSQKELWHKTPLFASEKTGGIVTQYSMKYLEPVDLIKFDFLGLKTLTVIDDALKIIKTQHKISVDFLSLDMDDPKVYKTIQSGDTVGIFQIESGMFQGLNKRLRPSSFEDIIAIIALGRPGPMESGMVDDFVNRKHGVEPIAYAFKELEPILKPTYGTIVYQEQVMQIVQTIGGFSLGEADLIRRAMGKKDAQIMADNKAKFVEGAKNLGHDGQKAANLWDLIVKFAGYGFNKSHSAAYAMITFQTAYLKTYYKHEFMAAMLTSESNKIESVARYIDEVRALEIEVMPPHINSSMQDFSVAEFKNQKGELEKKIVFGLGAIKGVGGEPIKNIIEERAKGDYKSLEDFISRVDFSKLTKKSLEPLVKSGSLDNLGYTRKTMLANLDLICDAGRAKDKANEMMQGGNSLFGAMEGGTKEQVVLDMIDLGEHDAKTLLECEYETLGIHVSGNPLDEFKEEIKGFKNLVKSIDIEELEIGSQAYLLGKIMEVKKKIGKRSGKPYGIADILDRYGKFELMLFEKQLNALEELDINKPLVFKCKIEEQEEVVRLRLFEILDLESAREVKIPKARYKDPEKQKEEVREIPPMEMLASSSCSLAIVLENDVKKEFLRQIKESALKHQGKRPLYLIIKDKDKQFKIQSDLMVNEKIKDDFKGLEWRDLA

SEQ ID NO: 11452 - protein, 682 aa, Helicobacter pylori
MMDFEKSILDHLNGAQKIAASHIQGPLLILAGAGSGKTKTLTSRLAYLIGVCGVPSENTLTLTFTNKASKEMQERALKLLKNQALIPPLLCTFHRFGLLFLRQHMNLLKRACDFSVLDSDEVKTLCKQLKISNFRASISQIKNGMMDLSMQDSECYKAYELYQNALKKDNLVDFDDLLFLSLKILQDNETIAKETSERYHYIMVDEYQDTNALQLEFLKKLSFTHHNLCVVGDDDQSIYGFRGADISNILNFSKHFKGAKIVKLETNYRSSAEILACANSLISHNQHRHIKTLQSFKGSHKSVVCKEYLTQKEESLDVAYQIKALLKKGENLENIAILYRLNGLSRSIEESLNALNIPYRLIGALSFYERAEIKDALAFMHLVAKKDDRFFIKRVLNKPPRGLGKITQEWIFSLLDEEGLNLEEALKLGAFKDKLNPKNEYALKQFIAMIGRLREAFEISVEEFCSRFLEETNLLKSYEKEDNYEEREGFVKELLTLVKEYFKTNPTHSLLDFLNESVLDAHNTENAQKVSCMSVHMSKGLEFKHVFVIGLEEGFFPHRGFNQESDLEEERRLAYVAITRAKEELQLSYVKERSYFGRKISCSPSVFLEEAQLLNQDNPPKQDHQKDAPIKVGDLIRHKIFGTGRVLGVEKGLSGLCLKINCGGNVYDKISEKFVEKVDNGF

SEQ ID NO: 11453 - protein, 262 aa, Helicobacter pylori
MARSFKHSQYPKIFKPLYPNNLTLSLKKQHVIMIAILFERVFMESVLNFLTNINVIFTLLGYLIGGIPFGYALMKIFYGMDITKIGSGGIGATNVLRALQSKGVSNAKQMALLVLILDLFKGMFAVFLSKLFGLDYSLQWMVAIASILGHCYSPFLNFNGGKGVSTIMGSVVLLIPIESLIGLTVWFFVGKVLKISSLASILGVGTATVLIFFVPYMHIPDSVNILKEVGTQTPMVLIFIFTLIKHAGNIFNLLAGKEKKVL

SEQ ID NO: 11454 - protein, 395 aa, Helicobacter pylori
MEKISDLIECIAYEKNLPKEMISKVIQGCLLKMAQNELDPLARYLVVEENKQLQLIQLVEVLEDGDERLVNDPSKYISLSKAKEMDPSVKIKDELSYSLSLESMKQGAINRLFKDLQYQLEKALEDSHFEAFQKRLNSVLMGQVILVDHNQNTFIEIEQQFQGVLSMRHRIKGESFKVGDSIKAVLTQVKRTKKGLLLELSRTTPKMLEALLELEVPEIKDKEIEIIHCARIPGNRAKVSFFSHNARIDPIGAAVGVKGVRINAISNELNKENIDCIEYSNVPEIYITLALAPAKILSVEIKKIPIEELNAEEKESIQERFIVNNHLQKAKVRLLDIEKSKAIGKGGVNVCLASMLTGYHIEFETIPSVKENAENESEKETPKVGVEALESLFKN

SEQ ID NO: 11455 - protein, 597 aa, Helicobacter pylori
MCGIVGYIGDSEKKSVLLEGLKELEYRGYDSAGLAVLSNDRLEVFKTQGKLENLKLELKNKEFLDFGVSIAHTRWATHGKPSSANAHPHFTENLALVHNGIIENYASLKKELENKGHAFLSQTDTEVIAHLLEETLKSESDLLKAFEKSISLLKGSYAILMLHKRAKESLFYAKSSSPLVVGKGKEGVFFASSLSVLAPKVDQFVILEENSVGRISLENFKDLNNIENMKDYAFEDKDYSKGNFRNYLEKEIYEQHSSLLECLEGRLEALSVYCEIDPEFLKNVSEITLCSCGSSYHASLASVYLFERLAKIRARAILASEYRYAHFKSNPNELFIAISQSGETADTLEALKLAKAQGLKTISLCNAPFSMMSRISDHTLLIRAGVERSVASTKAFSSQVMLLWLLSVYLGKQLGTISKEEERIQAKNMLNSVNAMKVEPKLHEKIKRLSKRYLHGHGFFYIGRDVFYPLALEGALKLKEISYLHAEGYASAEMKHGPIALVDSNLFTIALLSKHLLFDKTKSNIEELSARDSTICVLSSEILEIADDFIQLEESESYMEEFFRMNLAVQLLALEIAMRLNHDVDHPRNLAKSVTVE

SEQ ID NO: 11456 - protein, 264 aa, Helicobacter pylori
MVTMKDLLECGVHFGHQTRRWNPKTKKFIFGVRKNIHIIDLQKTLRYFRYTYNIVRDASAQGKSIMFVGTKKQANETLKEFAESIQVPYVNYRWLGGMLTNFSTIRKSVRKLEIIEEMENSGQIDLLTKKEKLMILRKKEKLDKYLGGVRHMKKIPDMIFVIDVAKEKIAVAEARKLHIPIVAPLDTNCDPDLVDYPIPGNDDAIRSIRLFCKEMSEAILEGRELMQEEIVHANENSEEIEYVSHEEKEEMLAEIQKEITQGAE

SEQ ID NO: 11457 - protein, 355 aa, Helicobacter pylori
MSGISAQLVKKLRDLTDAGMMDCKKALVEVAGDLQKAIDFLREKGLSKAAKKADRIAAEGVVALEVAPDFKSAMIVEINSETDFVAKNEGFKELVKKTLETIKAHNIHTTEELLKSPLDNKPFEEYLHSQIAVIGENILVRKIAHLKAPSSHIINGYAHSNARVGVLIGIKYDNEKNAPKVVELARNIAMHAAAMKPQVLDCKDFSLDFVKKETLALIAEIEKDNEEAKRLGKPLKNIPTFGSRIELSDEVLAHQKKAFEDELKAQGKPEKIWDKIVPGKMERFIADNTLIDQRLTLLGQFYVMDDKKTIAQVVADCSKEWNDDLKITEYVRFELGEGIEKKAENFAEEVALQMK

SEQ ID NO: 11458 - protein, 388 aa, Helicobacter pylori
  VARIANT (1)...(388): Xaa = Any Amino Acid
MTTDRNLFFCASLLIFLGVLMSYSLSTYTTVVLYHYGEFHFFIRQLVSAIIGIVIMWGLSRVDPSKWFSRLGFFLLFVPPLLIIGMFFLPESLSSSAGGAKRWIRLGFFSLAPLEFLKIGFTFFLAWSLSRTFVAKEKANVKEELITFVPYSVVFVALAIGVGVLQNDLGQIVLLGAVLAVLLVFSGGSVHLFGLIISGAFAISVLAIVTSEHRILRLKLWWSNLQNSLFTLLPDRLANALRISDLPESYQVFHAGNAMHNGGLFGQGLGLGQIKLGFLSEVHTDMVLAGIAEEWGFLGLCVCFILFSVLIVLIFRIANRLKEPKYSLFCVGVVLLISFSLVINAFGVGGILPVKGLAVPFLSYGGSSLLANCIAIGLVLXLARYTKG

SEQ ID NO: 11459 - protein, 198 aa, Helicobacter pylori
MLVTKLAPDFKAPAVLGNNEVDEHFELSKNLGKNGAILFFWPKDFTFVCPTEIIAFDKRVKDFQEKGFNVIGVSIDSEQVHFAWKNTPVEKGGIGQVTFPMVADITKSISRDYDVLFEEAIALRGAFLIDKNMKVRHAVINDLPLGRNADEMLRMVDALLHFEEHGEVCPAGWRKGDKGMKATHQGVAEYLKENSIKL

SEQ ID NO: 11460 - protein, 271 aa, Helicobacter pylori
MNAFKRIISVGVIALGLFNLLDAKHHKEKKENHKITRELKVGANPVPHAQILQSVVDDLKEKGIKLVIVSFTDYVLPNLALNDGSLDANYFQHRPYLDRFNLDRKMHLVGLANIHVEPLRFYSQKITDIKNLKKGSVIAVPNDPANQGRALILLHKQGLIALKDPSNLYATEFDIVKNPYNIKIKPLEAALLPKVLGDVDGAIITGNYALQAKLTGALFSEDKDSPYANLIAAREDNAQDEAIKTLIEALQSEKTRKFILDTYKGAIIPAF

SEQ ID NO: 11461 - protein, 254 aa, Helicobacter pylori
MFIDTHCHLDHKDYENDLEEVLKESLEKGVTQCVIPGADMKDLNRAIEISEKFEGVFFAIGAHPYDVESFDESLFEKFVGHQKCVAIGECGLDYYRLPELNERENYKSKQKEIFTKQIEFSIQHNKPLIIHIREASFDSLNLLKNYPKAFGVLHCFNADGMLLELSDRFYYGIGGVSTFKNAKRLVEILPKIPKNRLLLETDSPYLTPHPFRGTRNSPTYIPLIAQKIAEIINIETEELASLSTHNAQMLFSFP

SEQ ID NO: 11462 - protein, 206 aa, Helicobacter pylori
MFSGLIHQIAKVKSFHNNILNIESDLNPKLGDSIAINGACLTAIESSKTHFSVELSQKTQNSVALENYKDLVHIEPALKADASLDGHFVQGHIDAIGVIEKIIHNANQVDFFISASEETLLLCVEQGSIAVDGVSLTLSKVEEKGFWLTIIPYTLENTLFKAYKLKRRVNIETDMLVRSVASILKKTKGFEKNFSWNEADALTLGY

SEQ ID NO: 11463 - protein, 327 aa, Helicobacter pylori
MVVELKNIEKIYENGFHALKGVNLELKKGDILGVIGYSGAGKSTLIRLINCLERPSSGEVLVNGVNLLKLKPKELQKARQKIGMIFQHFNLLSAKNVFENVAFALEIARWEKNKIKSRVHELLELVGLEDKMHFYPKQLSGGQKQRVAIARSLANCPDLLLCDEATSALDSKTTHSILTLLSGIQKKLDLSIVFITHEIEVVKELCNQMCVISSGEIVERGSVEEIFANPKHAVTKELLGIRNEHADKKSQDVYRIVFLGEHLDEPIISNLIKRFKIDVSIISGNIEELTTKDIGYLVVRFLGNTAETQRALEYLNALGLQVEKLKD

SEQ ID NO: 11464 - protein, 215 aa, Helicobacter pylori
MISQMLIQATLETLYMVFVASFLAVVFGLPLGVLLLVSKKGHLLNKPLLHKILDTSINMTRSFPFIILIILLLPLSRFLIGTSIGSSASIIPLAISAIPFVAKLFENSLMEVEHGKIETTLSLGASHLEVIKMMLLESLPSLVNNITITLISLIGYSAMAGALGAGGLGDLAIRIGYQSYRGDVLFYAVVVIIVLVQIIQSVGDYVVKRLRKHKY

SEQ ID NO: 11465 - protein, 118 aa, Helicobacter pylori; identical to SEQ ID NO: 11281

SEQ ID NO: 11466 - protein, 1185 aa, Helicobacter pylori
MQKIIEDSLELAKKLQDSISNHLSEQEKAFHFKMQKLLNNPENKVMLIELMDRSFRCLDNKARFEMIEHVLDKYKSREIFSSFEKWLLMGFLSFGKMLPDMSVPFFVNKIRSDTKAMVLDQEESQLRERILKRKNEKIILNVNFIGEEVLGEEEASARFEKYSQALKSNYIQYISIKITTIFSQINILDFEYSKKEIVKRLDALYALALEEEKKQGMPKFINLDMEEFRDLELTVESFMESIAKFDLNAGIVLQAYIPDSYEYLKKLHAFSKERVLKGLKPIKIRFVKGANMESEETIASMKDWALPTFSSKQDTDSNYNKMLDFVLEGDNYKYIHIGAASHNIFEIAYVYTRIHALNDPVVLEHFSFEMLEGMSLQASQELKEMHKLILYAPVCDEAHFNNAIAYLVRRLDENTSSDNFMKAFFNLKVGTSEWKDQEQRFLNSLKGIATLDNTTHRTQDRNAKQTGHTTYPNHSFKNESDTDFILKANREWAKKVRDKMHNAPILELYPEIDGRFEDPNLTPLEVFDRIHHKKIASVHLADKEAILKALEVAKSDKSRFSQKSFTEIHALLSQTAQLFRERRGDLIGISALEVGKTFAETDAEVSEAIDFLEFYPYSLRVLQEQNKKTKFTPKGVGVVIAPWNFPVGISVGTIAAPLAAGNRVIYKPSSLSSVTGYKLCECFWDAGVPRDALIYLPSKGSDISEHLLKDESIKFAILTGGEDTAYKMLKANPTLALSAETGGKNATIVSKMADRDQAIKNVIHSAFSNSGQKCSATSLLVLEKEVYEDENFKKTLIDATLSLSVGDPFDFKNKIGALADKPNEKVIKAIDELKSYENYEIPASFVDDNPYLMKPSIKYGTKKGDFTHQTELFTPILSVMKAKDLDEAIEIVNSTGYGLTSALESLDEREWEYYLERIEAGNIYINKPTTGAIVLRQPFGGVKKSAVGFGRKVGIFNYITQFVNIHQEEEDENALKNPLSEALEGLTQKGYDEHTHELKRAIFMAKSYAYHYKHEFSQAKDYVKIRGEDNLFSYTKVTSVGYRITEKDTLSDMLGVALACLISQIPLTISIENERANKDLTFFLECLKALQANAPIVYESLQKFSEKLNAFNRVRYLKSDLDLLHEQASRLGMVLATAKPCLNGRFELLYYHLERSVSISYHRYGNLGSRVLRQPTCHKSCCAEK

SEQ ID NO: 11467 - protein, 199 aa, Helicobacter pylori
MVKIGVCGPVGSGKTALIEALTRHMSKDYDMAVITNDIYTKEDAEFMCKNSVMPRDRIIGVETGGCPHTAIREDASMNLEAVEEMHGRFPNLELLLIESGGDNLSATFNPELADFTIFVIDVAEGDKIPRKGGPGITRSDLLVINKIDLAPYVGADLKVMERDSKKMRGEKPFIFTNIRAKEGLDDVIAWIKRNALLED

SEQ ID NO: 11468 - protein, 238 aa, Helicobacter pylori
MKLTPKELDKLMLHYAGELARKRKEKGIKLNYVEAVALISAHIMEEARAGKKTAAELMQEGRTLLKPDDVMDGVASMIHEVGIEAMFPDGTKLVTVHTPIEANGKLVPGELFLKNEDITINEGKKAVSVKVKNVGDRPVQIGSHFHFFEVNRCLDFDREKTFGKRLDIASGTAVRFEPGEEKSVELIDIGGNRRIFGFNALVDRQADNESKKIALHRAKERGFHGAKSDDNYVKTIKE

SEQ ID NO: 11469 - protein, 445 aa, Helicobacter pylori
MKIFGTDGVRGKAGVKLTPMFVMRLGIAAGLYFKKHSQTNKILIGKDTRKSGYMVENALVSALTSIGYNVIQIGPMPTPAIAFLTEDMRCDAGIMISASHNPFEDNGIKFFNSYGYKLKEEEERAIEEIFHDEELLHSSYKVGESVGSAKRIDDVIGRYIAHLKHSFPKHLNLQKLRIVLDTANGAAYKVAPVVFSELGADVLVINDEPNGCNINEQCGALHPNQLSQEVKKYRADLGFAFDGDADRLVVVDNLGNIVHGDKLLGVLGVYQKSKNALSSQAVVATSMSNLALKEYLKSQDLELKHCAIGDKFVSECMRLNKANFGGEQSGHIIFSDYAKTGDGLVCALQVSALVLESKLVSSIALNPFELYPQSLVNLNIQKKPPLESLKGYSALLKELDQLEIRHLIRYSGTENKLRILLEAKDEKLLESKMQELKEFFEGQLC

SEQ ID NO: 11470 - protein, 129 aa, Helicobacter pylori; identical to SEQ ID NO: 11288

SEQ ID NO: 11471 - protein, 141 aa, Helicobacter pylori
MTKTAKVNDIVRDWVVLDAKDKVFGRLITEIAVLLRGKHRPFYTPNVDCGDFVVVINANKVKFSGMKLEDKEYFTHSGYFGSTKSKTLQEMLEKTPEKLYHLAVRGMLPKTKLGKAMIKKLKVYRDDKHPHTAQTSKKDAK

SEQ ID NO: 11472 - protein, 620 aa, Helicobacter pylori
MGKVIGIDLGTTNSAMAVYEGNEAKIIANKEGKNTTPSIVAFTDKGEILVGESAKRQAVTNPEKTIYSIKRIMGLMFNEDKAKEAEKRLPYKIVDRNGACAIEISGKIYTPQEISAKILMKLKEDAESYLGESVTEAVITVPAYFNDSQRKATKEAGTIAGLNVLRIINEPTSAALAYGLDKKESEKIMVYDLGGGTFDVTVLETGDNVVEVLATGGDAFLGGDDFDNRVIDFLAAEFKNETGIEIKNDVMALQRLKEAAENAKKELSSAMETEINLPFITADATGPKHLVKKLTRAKFESLTEDLVEETISKIESVIKDAGLTKNEISEVVMVGGSTRIPKVQERVKAFINKELNKSVNPDEVVAVGASIQGGVLKGDVKDVLLLDVTPLSLGIETLGGVMTKVIDRGTTIPAKKSQVFSTAEDNQPAVSIMVLQGERELARDNKSLGKFDLQGIAPAPRGMPQIEVTFDIDANGILTVSAQDKNTGKSQEIKISGSSGLSDSEIEKMVKDAELHKEEDARKKEVIEARNHADSLAHQTQKSLDEHKTNLNENDANEIQNAINALKDCIKNDNATKAELEDKTKALTQAAQKLGEAMANKNNAEQPKKKDDDVIDAEVE

SEQ ID NO: 11473 - protein, 736 aa, Helicobacter pylori
MKHLIIVESPAKAKTIKNFLDKNYEVVASKGHVRDLSKFALGIKIDETGFTPNYVVDKDHKELVKQIIELSKKASITYIATDEDREGEAIGYHVACLIGGKLESYPRIVFHEITQNAILNVLKTPRKIDMFKVNAQQARRLLDRIVGFKLSSLIASKITKGLSAGRVQSAALKLVIDREKEIRPFKPLTYFTLDALFEPHLEAQLISYKGNKLKAQELIDEKKAQEIKNELEKESYIISSIIKKSKKSPTPPPFMTSTLQQSASSLLGFSPTKTMSIAQKLYEGVATPQGVMGVITYMRTDSLNIAKEALEEARAKILKDYGKDYLPPKAKVYSSKNKNAQEAHEAIRPTSIILEPNALKDYLKPEELKLYTLIYKRFLASQMQDALFESQSVVVACEKGEFKASGRKLLFDGHYKILGNDDKDKLLPNLKENDPIKLEKLESNAHVTEPPARYSEASLIKVLESLGIGRPSTYAPTISLLQNRDYIKVEKKQISALESAFKVIEILEKHFEEIVDSKFSASLEEELDNIAQNKADYQQVLKDFYYPFMDKIEAGKKNIISQKVHEKTGQSCPKCGGELVKKNSRYGEFIACNNYPKCKYIKQTENANDEAKQELCEKCGGEMVQKFSRNGAFLACNNYPECKNTKSLKNTPNAKETIEGVKCPECGGDIALKRSKKGSFYGCNNYPKCNFLSNHKPINKRCEKCHYLMSERIYRKKKAHECIQCKERVFLEEDNG

SEQ ID NO: 11474 - protein, 203 aa, Helicobacter pylori
MSRNEVLLNGDINFKEVRCVGDNGEVYGIISSKEALKIAQNLGLDLVLISASAKPPVCKVMDYNKFRYQNEKKIKEAKKKQKQIEIKEIKLSTQIAQNDINYKVKHAREFIESNKHVKFKVVLKGRESQNSKAGLDVLFRVQTMMQDLANPEKEPKTEGRFVSWMFVPKAKEAPKNEKKTKENNPPFNRINLMKGENHAKNED

SEQ ID NO: 11475 - protein, 64 aa, Helicobacter pylori; identical to SEQ ID NO: 11296

SEQ ID NO: 11476 - protein, 426 aa, Helicobacter pylori [sequence omitted]

SEQ ID NO: 11477 - protein, 323 aa, Helicobacter pylori
MFKRLRRLRSSENLRAMVRETRLNINDFIAPLFVIESDSGIKNEISSMPGVYQMSIEPLLKECEELVGLGIKAVLLFGIPKHKDATGSHALNKDHIVAKATREIKKRFKDLIVIADLCFCEYTDHGHCGILENASVSNDKTLKILNLQGLILAESGVDILAPSNMMDGNVLSLRKALDKAGYFHTPIMSYSTKFASSYYGPFRDVANSPPSFGDRKSYQMDYANQKEALLESLEDEKQGADILMVKPALAYLDIVKEIRDHTLLPLALYNVSGEYAMLKLAQKHNLINYESVLLETMTCFKRAGADMIISYHAKEVANLLQRN

SEQ ID NO: 11478 - protein, 225 aa, Helicobacter pylori
MIEVLMIEDDIELAEFLSEFLLQHGIHVINYDEPYTGISAANTQNYDLLLLDLTLPNLDGLEVCRRISKQKHIPIIISSARSDVEDKIKALDYGADDYLPKPYDPKELLARIQSLLRRSHKKEEVSEPGDANIFRVDKDSREVYMHEKKLDLTRAEYEILSLLISKKGYVFSRESIAIESESINPESSNKSIDVIIGRLRSKIEKNPKQPQYIISVRGIGYKLEY

SEQ ID NO: 11479 - protein, 422 aa, Helicobacter pylori
MNQVELLSPAGNLKKLKIALNYGADAVYGGVSHFSLRNRAGKEFTLETFKEGIDYAHALDKKVYATINGFPFNSQLKLLEEHLYKMAELEPDAFIIAAPGVIKLASKIAPHIPVHLSTQANVLNTLDAQVFYDLGVKRIVCARELSLNDAVEIKKALPDLELEIFVHGSMCFAFSGRCLISALQKGRVPNRGSCANDCRFDYEYYVKNPDNGVMMRLVEEEGVGTHIFNAKDLNLSGHIAEILSSNAISALKIEGRTKSSYYAAQTTRIYRLAVDDFYHNTLKPSFYASELNTLKNRGFTDGYLMRRPFERLDTQNHQTAISEGDFQVNGEITEDGRFFACKFTTTTNTAYEIIAPKNAAITPIVNDIGKIYTFEKRSYLVLYKILLENNTELETIHSGNVNLVRLPAPLPAFSFLRTQVRV

SEQ ID NO: 11480 - protein, 390 aa, Helicobacter pylori
MISFKEALKIHSNIPLKPLEVEVVSLFESAGRILAEDIICVHALPKFNQSAMDGYGFKMQDLGQKTQVIQHIFAGDDVSALEVKENECVKIMTGAMVPKGIETIVPIECMLESHKDFALAPKDFKIHANIRQKGENASLNSVLVPKNTRLNYGHIALIASQGFKEIKAFRKLKIALFSSGDELVPLGQNALECQVYDVNSVGVFNMLKNYNTHFLGVLKDDKNLQLKILELQGYDVILSSAGVSVGDKDFFKDALKERNALFYYEKVNLKPGKPVTLAQLNQSIIIGLPGNPLSCLLVLRVLILPLLERLSLNKDFKLKPFKAQINAPLKLNNKRTHLILGNYSNHQFIPYNNRYESGAIQALAQVDSIALIDEGVGLVQGEIEILRFEN

SEQ ID NO: 11481 - protein, 307 aa, Helicobacter pylori
MLVKGNEILLKAHKEGYGVGAFNFVNFEMLNAIFEAGNEENSPLFIQASEGAIKYMGIDMAVGMVKIMCERYPHIPVALHLDHGTTFESCEKAVKAGFTSVMIDASHHAFEENLELTSKVVKMAHNAGVSVEAELGRLMGIEDNISVDEKDAVLVNPKEAERFVKESQVDYLAPAIGTSHGAFKFKGEPKLDFERLQEVKRLTNIPLVLHGASAIPDDVRKSYLDAGGDLKGSKGVPFEFLQESIKGGINKVNTDTDLRIAFIAEVRKVANEDKSQFDLRKFFSPAQLALKNVVKERMKLLGSANKI

SEQ ID NO: 11482 - protein, 234 aa, Helicobacter pylori
MTKIAMANFKSAMPVFKSHAYLKELEKTLKPQHFDRVFVFPDFLGLLPNAFLHFTLGAQNAYPRDCGAFTGEITSKHLEELKIHTLLIGHSERRVLLKESPSFLKEKFDFFKGKNFKIVYCIGEDLTTREKGFRAVKEFLSEQLENIDLNYSNLIVAYEPIWAIGTKKSASLEDIYLTHGFLKQILNQKTPLLYGGSVNAQNAKEILGIDSVDGLLIGSASLELENFKTIISFL

SEQ ID NO: 11483 - protein, 385 aa, Helicobacter pylori
MKDSFLFTSESVTEGHPDKMADQISDAVLDYIIERDKKAKVACETLVSNGFCMITGELKTSVYAPMQEIAREVVKKIGYTDALYGFDYRSAAVLNGIGEQSPDINQGVDREDGEIGAGDQGLMFGYACKETETLMPLPIHLAHQLAFALAQKRKDNTLPFLRPDGKSQVSVRYENNKPVSVDTIVISTQHSPEVSQKHLKEAVIEEIVYKVLPKEYLHDNIKFFINPTGKFVIGGPQGDAGLTGRKIIVDTYGGFCPHGGGAFSGKDPSKVDRSAAYAARYVAKNLVASGVCDKATVQLAYAIGVIEPVSIYVNTHNTSKHSSAELEKCVKSVFKLTPKGIIESLDLLRPIYSLTSAYGHFGRELEEFTWEKTNKVEEIKAFFKR

SEQ ID NO: 11484 - protein, 331 aa, Helicobacter pylori
MEFYASLKSIAMHVPSERVKNAEFQQFLDTSDEWIEKRTGIKERRFANDEEKSSDLGVIAAKQAIERAHLTPQDIDLVVVATLSPDFLAMPSTACVLSAKLGIENKPAFDISAACTGFIYLLSVAKAYVESGMYENVLIVGAEKTSSVLDFKDRGTCILFGDGAGACVIGRTKRLKESVLDVQISANGNFSNYLYTPRTLKPTPFNAKEEALEPFLRMKGNEVFKLAVKTLLKDVETILEKNALKPEDVRLFIPHQANFRIIQAVREHLDFKDEQVVLTVHKYGNTSAASIPMAMCEAYEEGRLKKGDLMLLDAFGGGLTWGSALVYFGGI

SEQ ID NO: 11485 - protein, 326 aa, Helicobacter pylori
MAKHDLVGSALWDAYSKEVQRRMDNPTHLGVITEEQAKAKNAKLIVADYGAEACGDAVRLYWLVDESTDIIIDAKFKSFGCGTAIASSDMMVELCLNKRVQDAVKITNLDVERGLRDDPDTPAVPGQKMHCSVMAYDVIKKAAGMYLGKNAEDFEEEIIVCECARVSLGTIKEVIRLNDLKSVEEITNYTKAGAFCKSCVRPGGHEKRDYYLVDILKEVREEMEAEKLKATANKSQNGELAFREMTMVQKIKAVDKVIDENIRAMLMMDGGDLEILDIKESDDYIDVYIRYMGACDGCMSATTGTLFAIENALQELLDRSIRVLPI

SEQ ID NO: 11486 - protein, 306 aa, Helicobacter pylori
MEKLVIGSRGSELALWQANHIKERLKKECSMESEIRIVKTTGDKILDAPLNKIGGKGLFTKELEELLLKGAIDLAVHSLKDVPVVFEKGLDLACITKRADVRDTFLSVKFPDLMSLPKGAKVGTTSLRRSMQIKFKRKDLDTESLRGNVQTRLKKLECGEFDAIILAEAGLCRLNVQGAKYRKAFSVKEMIPSMGQGALGVEMLKNHKHFITLQKLNNEESAFCCHLEREFIKGLNGGCQIPIGVHANLMGDEVKIRAVLGLPNGKEVIAKEKQGDKTKAFDLVQELLEEFLQSGAKEILEKAQLF

SEQ ID NO: 11487 - protein, 411 aa, Helicobacter pylori
MADVVVGIQWGDEGKGKIVDRIAKDYDFVVRYQGGHNAGHTIVHKGVKHSLHLMPSGVLYPKCKNIISSAVVVSVKDLCEEISAFEDLENRLFISDRAHVILPYHAKKDAFKEKSQNIGTTKKGIGPCYEDKMARSGIRMGDLLDDKILEEKLNAHFKAIEPFKKAYDLGENYEKDLMGYFKTYAPKICPFIKDTTSMLIEANQKGEKILLEGAQGTLLDIDLGTYPFVTSSNTTSASACVSTGLNPKAINEVIGITKAYSTRVGNGPFPSEDTTPMGDHLRTKGVEFGTTTKRPRRCGWLDLVALKYACALNGCTQLALMKLDVLDGIDAIKVCVAYERKGERLEAFPSDLKDCTPIYQTFKGWEKSVGVRKLDDLEPNAREYIRFIEKEVGVKIGLISTSPEREDTIFL

SEQ ID NO: 11488 - protein, 420 aa, Helicobacter pylori
MHVLSVSEINAQIKALLEATFLQVRVQGEVSNLTIHKVSGHAYFSLKDSQSVIRCVLFKGNANRLKFALKEGQEMVVFGGISVYAPRGDYQINCFEIEPKEIGSLTLALEQLKEKLRLKGYFDEANKLPKPNFPKRVAVITSQNSAAWADMKKIASKRWPMCELVCINTLMQGEGCVQSVVESIAYADSFYDTKNAFDAIVVARGGGSMEDLYSFNDEKIADALYLAKTFSMSAIGHESDFLLSDSVADLRASTPSNAMEILLPSSDEWLQRLDGFNVKLHRSFKTLLHQKKAHLEHLAASLKRLSFENKHHLNALKLEKLTIALDNKTLEFLRLKKTLLEKISTQLSTSPFLQTKTERLNRLENALKLAYANLKLPQFGALVSKNHQAIELEALKRGDKIELSNEKARASAEILSVDRV

SEQ ID NO: 11489 - protein, 856 aa, Helicobacter pylori
MNLFEKMTDQLHETLDSAIALALHHKNAEVTPMHMLFAMLNNSQGILIQALQKMPVDIEALKLSVQSELNKFAKVSQISKQNIQLNQALIQSLENAQGLMAKRGDSFIATDAYLLANMNLFESVLKPYLDTKELQKTLESLRKGRTIQDKNDDSNLESLEKFGIDLTQKALENKLDPVIGRDEEIIRMMQILIRKTKNNPILLGEPGVGKTAVVEGLAQRIVNKEVPKTLLNKRVVALDLSLLVAGAKYRGEFEERLKKVIEEVKKSANVILFIDEIHTIVGAGASEGGMDAANILKPALARGELHTIGATTLKEYRKYFEKDMALQRRFQPILLNEPSINEALQILRGLKETLETHHNITINDSALIASAKLSSRYITDRFLPDKAIDLIDEGAAQLKMQMESEPAKLSSVKRSIQRLEMEKQALEMENKESNHKRMQEILKELSDLKEEKIQLEAQFENEKEVFKEISRLKMEMEGLKKEAERFKRNGDYQQAAEIEYSKIPEKEKKEKELQHKWETMQQNGALLQNALTENNIAEIVSQWTHIPVQKMLQSEKNRVLNIESELQKRVVGQEKALKAIAKAIKRNKAGLSDSNKPIGSFLFLGPTGVGKTESAKALAQFLFDSDKNLIRIDMSEYMEKHAISRLIGAAPGYVGYEEGGQLTEAVRRKPYSVVLLDEVEKAHPDVFNLLLQVLDEGHLTDSKGVRVDFKNTILILTSNVASGALLEEDLSEADKQKAIKESLRQFFKPEFLNRLDEIISFNALDSHAIINIVGILFENVQKKALERGINITLDEKAKELIAEAGFDRFYGARPLKRALYEMVEDKLAELILEDKIKENDSVAFVVENNEIVPKIK

SEQ ID NO: 11490 - protein, 371 aa, Helicobacter pylori
MDFQLQAVDDNARAGVLNLAHSQVETPVFMPVGTQGCIKSLDAMDAQEILGAKLILANTYHMYLRPGEKVVEQLGGLHRFAQFQGSFLTDSGGFQAFSLSDNVKLQEDGIVFKSHIDGSKHLFTPIKVLDIQYSLNSDIMMVLDDLVGLPAPLKRLEESIKRSAKWANMSLEYHKENNRPNNNLFAIIQGGTHLKMRSLSVGLTHEGFDGYAIGGLAVGESVDEMLETIAHTAPLLPKDKPRYLMGVGTPENILDAISLGVDMFDCVMPTRNARNATLFTHSGKISIKNAPYKLDDTPIEENCACYACKRYSKAYLHHLFRAKELTYARLASLHNLHFYLELVKNARNAILEKRFLSFKKEFLEKYHSCSH

SEQ ID NO: 11491 - protein, 405 aa, Helicobacter pylori
MFNYEELFQTYKTPFYLYDFDKIKQAFLNYKEAFKGRKSLICYALKANSNLSILSLLANLGSGADCVSIGEIQRALKAGIKPYKIVFSGVGKSAFEIEQALKLNILFLNVESFMELKTIETIAQSLGIKARISIRINPNIDAKTHPYISTGLKENKFGVEEKEALEMFLWAKKSAFLEPVSVHFHIGSQLLDLDPITEASQKVAKIAKSLIALGIDLRFFDVGGGIGVSYENEETIKLYDYAQGILNSLQGLDLTIICEPGRSIVAESGELITQVLYEKKAQNKRFVIVDAGMNDFLRPSLYHAKHAIRVITPCGGREISPCDVVGPVCESSDTFLKDANLPELEPGDKLAIEKVGAYGSSMASQYNSRPKLLELALEDHKIRVIRKREALEDLWRLEIEGLEGV

SEQ ID NO: 11492 - protein, 104 aa, Helicobacter pylori
MSYAIFKHGGKQYKVVEGDIVLLDKMNKEPKALVELVEVLAVSKEGKLSCGKPFVNGAKIEAEVINEGRSKKVITFKKRRRKDSKTKRGFRRDFTRVRITKIVA

SEQ ID NO: 11493 - protein, 88 aa, Helicobacter pylori
MAHKKGQGSTQNNRDSAGRRLGVKKFGSEFVRAGNIIVRQRGTKIHPGNNVGMGKDHTLYALIDGVVKFEHKDRSRKKVSVISGNFGE

SEQ ID NO: 11494 - protein, 287 aa, Helicobacter pylori
MILEVKDLKTYFFTDKGVNKAVDGVSFGLKKSQTLCIVGESGSGKSITSLSILGLIEKPGKIVGGSIQFLGQDLLQLKEKQMQKEIRGKKIGMIFQEPMTSLNPSYTVGFQINEVLKIHHPSLNKKERLERVVYELERVGIPHAGDKYHEYPFNLSGGQRQRVMIAMAMVCEPEILIADEPTTALDVTIQAQILELMKELQQKKGTSILFITHDLGVVAQIADEVVVMYKGHVVEQASAKELFADPRHPYTKALLNAIPKPGKEYRKKRLETVDENVDYLSFQKELR

SEQ ID NO: 11495 - protein, 268 aa, Helicobacter pylori
MKLLEIKELKKSYAIDRGLFKPKRVIHALNGISFEVEQNEVLSIVGESGCGKSTTAKILAGIERQDSGAIYFNGKRHLHFSKQDWFDYRKKVQMIFQDPYSSLNPRWKVGEIIAEPLLLNSHFSKKEIKTKVLEIMQKVGLKLEWIDRYPHQFSGGQRQRIGIARALILHPSVVICDEPVSALDVSIQAQVLNLLLDLQKEMGLTYIFISHDLGVVEHISDKIIVMNQGQIVETGDVDSVISAPKHPYTQKLLNAVPHLEKSMQRFAE

SEQ ID NO: 11496 - protein, 260 aa, Helicobacter pylori
MQKDYQKLIVYLCDFLEKEVQKKGFKKVVYGLSGGLDSAVVGVLCQKVFKENAHALLMPSSVSMPESRTDALNLCEKFSIPYTEYSIAPYDKIFGSHFKDASLTRKGNFCARLRMAFLYDYSLKSDSLVIGTSNKSERMLGYGTLFGDLACAINPIGELFKTEVYELAYYLNIPKKILNKPPSADLFVGQSDEKDLGYPYSVIDPLLKDIEALFQTKPIHLETLIQLGYAEILVKNIISRIQKNAFKLELPTIAKRFNPE

SEQ ID NO: 11497 - protein, 844 aa, Helicobacter pylori
MKSKKLYLALIIGVLLAFLTLSSWLGNSGLVGRFGVWFAAINKKYFGYLSLINLPYLAWVLFLLYRAKNPFTEIVLEKTLGHLLGILSLLFLQSSLLNQGEIGNSARLFLHPFIGDFGLYVLIMLMVVISYLILFKLPPKSVFYPYMNKTQSLLKEIYKQCLQAFSPNFSLKKEGFENTPSDSQKKETNNDKEKENLKENPIDENHNTPNEESFLAIPTPYNTTLNNSEPQEGLVQISPHPPTHYTIYPKRNRFDDLTNPTLKEPKQETKEREPTLKKETPTTLKPIMPISASNTENHDKTENHKTPNHPIKEDDLQESPQENPQKENIEENIEEKETQNAPSFSPLTLTSAKKPVMVKELSENKEILDGLDYGEVQKPKDYELPTTQLLNAVCLKETSLDENEIDQKIQDLLSKLRTFKIDGDIIRTYSGPIVTTFEFRPAPSVKVSRILGLSDDLAMTLCAESIRIQAPIKGKDVVGIEIPNSQSQIIYLREILESELFQKSSSPLTLALGKDIVGNPFITDLKKLPHLLIAGTTGSGKSVGVNAMILSLLYKNPPDQLKLVMIDPKMVEFSIYADIPHLLTPIITDPKKAIGALQSVAKEMERRYSLMSEYKVKTIDSYNEQAQSNGVEAFPYLIVVIDELADLMMTGGKEAEFPIARIAQMGRASGLHLIVATQRPSVDVVTGLIKTNLPSRVSFRVGTKIDSKVILDTDGAQSLLGRGDMLFTPPGTNGLVRLHAPFATEDEIKKIVDFIKAQKEVEYDKDFLLEESRMPLDTPNYQGDDILERAKAVILEKKITSTSFLQRQLKIGYNQAATITDELEAQGFLSPRNAKGNREILQNF

SEQ ID NO: 11498 - protein, 745 aa, Helicobacter pylori
MKESFYIEGMTCTACSSGIERSLGRKSFVKKIEVSLLNKSANIEFNENETNLDEIFKLIEKLGYSPKKTLAEEKKEFFSPNVKLALAVIFTLFVVYLSMGAMLSPSLLPESLLTINHHSNFLNACLQLIGALIVMHLGRDFYIQGFKALWHRQPNMSSLIAIGTSAALISSLWQLYLVYTNHYTDQWSYGHYYFESVCVILMFVMVGKRIENVSKDKALDAMQALMKNAPKTALKMHNNQQIEVLVDSIVVGDILKVLPGSAIAVDGEIIEGEGELDESMLSGEALPVYKKVGDKVFSGTLNSNTSFLMKATQDNKNSTLSQIIEMIHNAQSSKAEISRLADKVSSVFVPSVIAIAVLAFVVWLIIAPKPDFWWNFRTALEVFVSVLVISCPCALGLATPMSILVANQKASSLGLFFKDAKSLEKARLVNTIVFDKTGTLTNGKPVVKSIHSNIELLELLSLASSIEKSSEHVIAKGIVEYAKERNAPLKDISEVKVKTGFGISAKVDYQGAKEIIKVGNSEFFNPINTLEIKENGILVFVGRAINEKEDELLGAFVLEDLPKKGVKEHIAQIKNLGINTFLLSGDNRENVKKCALELGIDGYISNAKPQDKLNKIKELKEKGRIVMMVGDGLNDAPSLAMSDVAVVMAKGSDVSVQAADIVSFNNDIKSVYSAIKLSQATIKNIKENLFWAFCYNSVFIPLACGVLYKANIMLSPAIAGLAMSLSSVSVVLNSQRLRNFKIKDH

SEQ ID NO: 11499 - protein, 345 aa, Helicobacter pylori
MKEFDLESYDYHLPKELIANYPVLPKEKAKLLVYERRSQTITHTTFEHVLDFFPKNALVVLNDTKVIKARLFGSKHAFLPSKTTEVFFHRFFKGNTALTQIKGKIKVGDKIFFDANYYAEVLELLHNGQRLIAFYDNQTPLNQENILKLLEQYGHMPLPPYIKRADESLDAHEYQSVFAKHIGAVAAPTASLHFSQNALEKLLKDFKHAFLTLHVGAGTFLSVETKDIREHQIHTEVLHIPKKSQEILQESQEVLCIGTTALRSVEYFKRLKNPNQESFECDIFLHLANPIQHVNHLLTNFHLPKSSLLMLVSAMIGLEKTKEIYKIAIEKKYRFYSYGDGMLIL

SEQ ID NO: 11500 - protein, 194 aa, Helicobacter pylori
MLKTNQKNVHAFEIEKQEPEAVMEFLEKNHALLQYFLIIFKYDIESEVKAVLHKHQLLFLETNRALNGRYIKTTEKDANLLKQNSPNAIEPKTTIYERNIRSGEEIYSTNHLIFLGNIHNGAKIISEGSVSVYGVCEGAIVCFGEYLILKEVKSAQIVFQNKILSLKEVERLLVNKNIKIITKNDDILDIKEVL

SEQ ID NO: 11501 - protein, 949 aa, Helicobacter pylori
MSDMVDLKKFVTELGKTQKELKNVIEQAKDIGLELKTNFKMTPEQAGKLYKYIVDGIKEQIQANQPTKNPKQDNKDDLNTAATPKPLAKKASKTPKKEETKAQPKPKKTKEKKKEAPAPIIKKKEIEIVNTFENQTPLVENTPKAVSHSQIEKAKQKLQEIQKSREALNKLTQSNTNTTNNANSASNVSNAKKEISEVKKQEQEIKRHENIKRRTGFRVIKRNDETENETENSVTESKKPTQSAAAIFEDIKKEWQEKDKQETKKTKKPSKPKATPTAKNNKSHKIDFSDVRDFKGNDIYDDETDEILLFDLHEQDNLNKEEEEKEARQNINDRVRVQRKNPWMNEAGIKRQSKKKRVFRNDNSQKVIQSAIAIPEEVRVYEFAQKANLNLADVIKTLFNLGLMVTKNDFLDKDSIEILAEEFHLEISVQNTLEEFEVEEVLEGVKKERPPVVTIMGHVDHGKTSLLDKIRDKRVAHTEAGGITQHIGAYMVEKNNKWVSFIDTPGHEAFSQMRNRGAQVTDIAVIVIAADDGVKQQTIEALEHAKAANVPVIFAMNKMDKPNVNPDKLKAECAELGYNPVDWGGEHEFIPVSAKTGDGIDNLLETILIQADIMELKAIEEGSARAVVLEGSVEKGRGAVATVIVQSGTLSVGDSFFAETAFGKVRTMTDDQGKSIQNLKPSMVALITGLSEVPPAGSVLIGVENDSIARLQAQKRATYLRQKALSKSTKVSFDELSEMVANKELKNIPVIIKADTQGSLEAIKNSLLELNNEEVAIQVIHSGVGGITENDLSLVSSSEHAVILGFNIRPTGNVKNKAKEYNVSIKTYTVIYALIEGMRSLLLGLMSPIIEEEHTGQAEVRETFNIPKVGTIAGCVVSDGEIARGIKARLIRDGVVVHTGEILSLKRFKDDVKEVSKGYECGIMLDNYNEIKVGDVFETYKEIHKKRTL

SEQ ID NO: 11502 - protein, 90 aa, Helicobacter pylori
MALNLEKKQEIIKAFATKANDTGSCEVQVALLNERIKLLTEHLKTNPKDHSSRLGLLKLVAQRRNLLKYIKRTDHVRYVVLIEKLGIKDR

SEQ ID NO: 11503 - protein, 475 aa, Helicobacter pylori
MEHQNTTQKQGELKRDMKMRHLLMIAFGGAIGTGLFVGTGGNIASAGPLGTLIAYCFGGLVVYCIMLSLGELASVYPTTGSFGDYAAKFIGPGTGYMVFWMYWLGWVITVALEYIAIGMLMQRWFVNIPIHYWVISCIALVFLLNFFSVKIFAEGEFFFSLIKVLAVIAFISIGVIGIIYQIYLHGFSSIFDNFHFGDKGFFPNGSEAVFSAMLAVIFAFTGTEVIGVAVGETKNASEVMPKAIKATLWRIVFFFLGSVFVISVFLPMSDSSIAQSPFVSVLERINLPFIGMGIPYVADIMNAVIITAMFSTANSGLYGASRMIYGLSKQKMFFKVFSQLNRQGTPTYAMFFSLSFSLIGLLVQIYAKENVVEALINVISFTVIIVWVSVSISQYSFRKQYLKAGHSLEDLPYKAPFLPFLQLIGITGCIIGVIGSAMDKDQRIGMILTIVFAVVCYIGYYFTQKANENNKKDLI

SEQ ID NO: 11504 - protein, 200 aa, Helicobacter pylori
MCGAQFFRARVLEFFTSLFESMKVLKLLPNFLTILRIVLSLFLLFLLLNTHTYFSFLTPFHINMISSLVFLFAALTDLLDGYIARSYKAKSRFGEIFDPLADKILILSAFLGLVYLDRVNAWVPFVILGREFFISGLRVLAANEKKDIPVNALGKYKTVSQVVAIGALLANLTYSYVLVAIAVFLTLYSGIDYTIKYYKS

SEQ ID NO: 11505 - protein, 62 aa, Helicobacter pylori; identical to SEQ ID NO: 11327

SEQ ID NO: 11506 - protein, 254 aa, Helicobacter pylori
MKVGVYGASGRIGKLLLEELKGGYKGLELSSVFVRQKCETDFSSFSHAPLVTNDLKAFVKACECVVDFSLPKGVDHLLDVLLECPKILVSGTTGLEKETLEKMQKLALKAPLLHAHNMSIGIMMLNQLAFLTSLKLKDADIEIVETHHNLKKDAPSGTALSLYETCTKARGYDEKNALITHREGLRSKESIGIATLRGGDVAGKHTIGFYLEGEYIELSHTATNRSIFAKGALEVALWLKDKAAKKYEISEMFG

SEQ ID NO: 11507 - protein, 481 aa, Helicobacter pylori
MVVRTQNSESKIKEFFEFCKENEVEFVDFRFSDIKGTWNHIAYSFGALTHDMFKEGIPFDASSFKGWQGIEHSDMILTPDLVRYFIDPFSADVSAVVFCDVYDVYKNQPYEKCPRSIAKKALKHLRDLGLGDVAYFGAENEFFIFDSIKIKDASNSQYYEVDSEEGEWNRDKSFENGVNFGHRPGKQGGYMPVPPTDTMMDIRTEIVKVLNQVGLETFVVHHEVAQAQGEVGVKFGDLVEAADNVQKLKYVVKMVAHLNGKTATFMPKPLYGDNGSGMHTHVSIWKNNENLFGGETYKGLSEFALYFLGGVLRHARGLAAFTNASTNSYKRLIPGYEAPSILTYSASNRSASVRIPYGISKNSARFEFRFPDSSSNPYLAFGAILMAGIDGIKNKMDPGEAMDINLFKLTLDEIREKGIKQMPHTLRRSLEEMLADKQYLKEGQVFSEEFIQAYQSLKFHSEVFPWESKPHPFEFITTYSC

SEQ ID NO: 11508 - protein, 149 aa, Helicobacter pylori
MKVLLLEDVKNLGKAGEVCEVKDGYGNNFLIANQKAKLATNEVINKYKAEVKKKAEKEALEKAQKLQMVETLQTITLTIHKKVGANGSLFGAITKEEITERLKEQHASLNLDKKDIELKHPIKSTGIYEIEVKLGSGIAGVFKIDVVAE

SEQ ID NO: 11509 - protein, 438 aa, Helicobacter pylori
MNENAPTHKSSHKVKTHTPVSGYHIEDLRTYPTEKLLEIANKLKVENPQEFKRQDLMFEILKTQVTQGGYILFTGILEIMPDGYGFLRGFDGSFSDGHNDTYVSPSQIRRFALRNGDIVTGQVRSPKDQEKYYALLKIEAINYLPSDEIKNRPLFDNLTPLFPDEQIKLEYEPTKVTGRMLDLFSPVGKGQRALIVAPPRTGKTELMKELAQGITSNHPEVELIILLVDERPEEVTDMQRSVKGQVFSSTFDLPANNHIRIAELVLERAKRRVEMGKDVVVLLDSITRLARAYNAVTPSSGKVLSGGVDANALHRPKRFFGAARNIEEGGSLTIIATALIETGSRMDEVIFEEFKGTGNSEIVLARNIADRRIYPAFDILKSGTRKDNILLGKDRLTKVWVLRNVMQQMDDIEALSFVYSKMQQTKDNEEFLNLMNEK

SEQ ID NO: 11510 - protein, 67 aa, Helicobacter pylori; identical to SEQ ID NO: 11336

SEQ ID NO: 11511 - protein, 312 aa, Helicobacter pylori
MAIYLDFENHIKEIQNEIELALIRGDEDAKEILEKRLDKEVKSIYSNLTDFQKLQLARHPDRPYAMDYIDLILKDKYEVFGDRHYNDDKAIVCFIGKIDNVPVVVIGEEKGRGTKNKLLRNFGMPNPCGYRKALKMAKFAEKFNLPILMLVDTAGAYPGIGAEERGQSEAIAKNLQEFASLKVPTISIIIGEGGSGGALAIAVADKLAMMEYSIFSVISPEGCAAILWDDPSKTEVAIKAMKITPRDLKEAGLIDDIILEPSKGAHRDKFSAANTIKEYFLDALRTIQQDPHFLDNRYQKLMSLGSFVESMN

SEQ ID NO: 11512 - protein, 412 aa, Helicobacter pylori
MRRIVVTGMGMINSLGLNKEDSFLAIAKGECGIKNIESFDANAFPVRIAGEITDFDPTEVMNPKDVKKAGRFIQLALKATREAMKDSGILDAHNRCPEELANRMGVSSGSGIGGLGNIEANSIFCFEKGPRKVNPFFITSALVNMIGGFTSIEFGIKGPNLSSVTACAAGTHAIIEAVKTILLNGADRMLVVGAESTICPVGIGGFASIKALSTRNDDPKKASRPFDKDRNGFVMGEGAGALVLEEYESAKKRGAKIYAEFAGYGESGDANHITAPAPEGEGAFRAMKMALEMAKVEVGYVNAHGTSTHYNDWYESIALKNVFGSKEKVPPVSSTKGQIGHCLGAAGALEAVISIMAMNQGILPPTINQETPDPECDLDYIPNTAREKQVNAVMSNSFGFGGTNGVVIFKKA

SEQ ID NO: 11513 - protein, 78 aa, Helicobacter pylori
MALFEDIQAVIAEQLNVDAAQVTPEAEFVKDLGADSLDVVELIMALEEKFNIEIPDEQAEKIVNVGDVVKYIEDNKLA

SEQ ID NO: 11514 - protein, 247 aa, Helicobacter pylori
MQFTGKNVLITGASKGIGAEIAKTLASMGLKVWINYRSNAEVADALKNGLEEKGYKAAVIKFDAASESDFVEAIQTIVQSDGGLSYLVNNAGVVRDKLAIKMKTEDFHHVIENNLTSAFIGCREALKVMSKSRFGSVVNVASIIGERGNMGQTNYSASKGGMIAMSKSFAYEGALRNIRFNSVTPGFIETDMNANLKDELKADYVKNIPLNRLGSAKEVAEAVAFLLSDHSSYITGETLKVNGGLYM

SEQ ID NO: 11515 - protein, 151 aa, Helicobacter pylori
MNKPLNTAQVFIGSDHAGLHLAEFVKHFLEDKRFKIQAFLPTTRVDYPDYAKLVCQKVLENAQSYGILVCATGIGMSMGANRFKGIRAALCLDAYMAKMTRLHNNANVLCLGEKISGIGVAESILEAFFSTEFEQGRHVLRIQKLDESLKS

SEQ ID NO: 11516 - protein, 1028 aa, Helicobacter pylori
MYKTAINRPITTLMFALAIVFFGVMGFKKLSVALFPKIDLPTVVVTTTYPGASAEIIESKVTDKIEEAVMGIDGIKKVTSTSSKNVSIVVIEFELEKPNEEALNDVVNKISSVRFDDSNIKKPSINKFDTDSQAIISLFVSSSSVPATTLNDYAKNTIKPMLQKINGVGGVQLNGFRERQIRIYADPTLMNKYNLTYADLFSTLKAENVEIDGGRIVNSQRELSILINANSYSVADVEKIQVGNHVRLGDIAKIEIGLEEDNTFASFKDKPGVILEIQKIAGANEIEIVDRVYEALKHIQAISPSYEIRPFLDTTSYIRTSIEDVKFDLILGAILAVLVVFAFLRSGTITLVSAISIPISIMGTFALIQWMGFSLNMLTMVALTLAIGIIIDDAIVVIENIHKKLEMGMSKRKASYEGVKEIGFALVAISAMLLSVFVPIGNMKGIIGRFFQSFGITVALAIALSYVVVVTIIPMVSSVVVNPRHSRFYMWSEPFFKALESRYTKLLQWVLNHKLIIFIAVVLVFVGSLFVASKLGMEFMLKEDRGRFLVWLKAKPGVSIDYMTQKSKIFQKAIEKHDEVEFTTLQVGYGTTQNPFKAKIFVQLKPLKERKKEHELGQFELMSALKKELKSMPEAKDLDSINLSEVALIGGGGDSSPFQTFVFSHSQEAVDKSVENLRKFLLESPELKGKVESYHTSTSESQPQLQLKILRQNANKYGVSAQTIGSVVSSAFSGTSQASVFKEDGKEYDMIIRVPDDKRVSVEDIKRLQVRNKYDKLMFLDALVEITETKSPSSISRYNRQRSVTVLAEPNRNAGVSLGEILTQVSKNTKEWLVEGANYRFTGEADNAKESNGEFLVALATAFVLIYMILAALYESILEPFIIMVTMPLSFSGAFFALGLVHQPLSMFSMIGLILLIGMVGKNATLLIDVANEERKKGLNIQEAILFAGKTRLRPILMTTIAMVCGMLPLALASGDGTAMKSPIGIAMSGGLMISMVLSLLIVPVFYRLLAPIDDKIKRFYQNQKALE

SEQ ID NO: 11517 - protein, 656 aa, Helicobacter pylori
MIKSQKEYLERIEYLNTLSHHYYNLDEPIVSDAVYDELYQELKAYEEENPNRIQANSPTQKVGATATNEFSKNPHLMRMWSLDDVFNQNELRAWLQRILKVYPNASFVCSPKLDGVSLNLLYQHGKLISATTRGNGLEGELVTNNAKHIANIPHSIAYNGEIEIRGEVIISKEDFDALNKERLNANEPLFANPRNAASGSLRQLDSNITKKRKLQFIPWGVGKHSLHFLRFKECLDFIVSLGFSAIQYLSLNKNHQEIEENYHTLIREREGFFALLDGMVIVVDELDIQKELGYTQKSPKFACAYKFPALEKHTKIVGVINQVGRSGAITPVALLEPVEIAGAMVNRATLHNYSEIEKKNIMLNDRVVVIRSGDVIPKIIKPLESYRDGSQQKIMRPKVCPICSHELLCEEIFTYCQNLNCPARLKESLIHFASKDALNIQGLGDKVIEQLFEEKLIFNALDLYALKLEDLMRLDKFKIKKAQNLLDAIQKSKNPPLWRLINALGIEHIGKGASKTLAKYGLNVLEKSEAEFLEMEGFGVEMAHSLVNFYASNQEFIRSLFELLNPKSSDTAEEKQKSSSVFSDKTIVLTGTLSKPRQEYAQMLENLGAKIASSVSAKTDFLIAGENAGSKLALAQKHGVSVLNEEELLKRLKELD

SEQ ID NO: 11518 - protein, 579 aa, Helicobacter pylori
MRSHFCTEISEKDVGKTIKVAGWCNTYRDHGGVVFIDLRDKSGLVQLVCDPSSKAYEKALEVRSEFVLVAKGKARLRGAGLENPKLKTGKIEIVLEELVIENKSATPPIEIGNKSVNEDLRLKYRYLDLRSLNAYEIFKLRSEVALITRNALAQKGFLEIETPILSKTTPEGARDYLVPSRVHEGEFFALPQSPQLFKQLLMVGGMDRYFQIARCFRDEDLRADRQPEFTQIDAEMSFCDEDDVMGVVEDLLQEIFKAIGHTISKPFKRMPYKEAMENYGSDKPDLRFELPLIEVGDCFMDSSNSIFSNIAQDPKDKRIKALNVKGADAVFSRSVLKELEEFVRQFGAKGLAYLQIKEDGIKGPLVKFLSEKGLKNILERTDAQVGDIVFFGAGDKKIVLDYMGRLRLKVAETLDLIDKDALNFLWVVHFPMFEKTENGYHAAHHPFTMPKNIECEDIEEIEAHAYDVVLNGVELGGGSIRIHKEEMQKKVFEKININEEEAQKKFGFLLEALKFGAPPHGGFAIGFDRLIMLMTKSNSIRDVIAFPKTQKASCLLTDAPSPINEEQLRELHIRLRKPI

SEQ ID NO: 11519 - protein, 762 aa, Helicobacter pylori
MSDASKRSLNPTLMMNNNNTLPKPLEESLDLKEFIALFKTFFAKERGSIALENDLKQAFTYLNEVDAIGLPAPKSVKESDLIVVKLTKLGTLHLDEIYEIVKRLRYIVVLQNAFKPFTHLKFHERLNAIILPPFFNDLILLLDDEGQIKQGANATLDALNESLNRLKKESTKIIHHYAHSKELAPYLVDTQSHLKHGYECLLLKSGFSSAIKGVVLERSANGYFYLLPESAQKIAQKIAQIGNEIDCCIVEMCQTLSRSLQKHLLFLKFLFKEFDFLDSLQARLNFAKAYNLEFVMPSFTQKKMILENFSHPILKEPKPLNLKFEKSMLAVTGVNAGGKTMLLKSLLSAAFLSKHLIPMKINAHHSTIPYFREIHAIINDPQNSANNISTFAGRMKQFSALLSKENMLLGVDEIELGTDADEASSLYKTLLEKLLKQNNQIVITTHHKRLSVLMAENKEVELLAALYDEEKERPTYTFLKGVIGKSYAFETALRYGVPPFLIEKAKAFYGEDKEKLNVLIENSSTLERELKQKNEHLENALKEQEDLKNAWLLEMEKQKEIFHHKKLELEKSYQQALNILKSEVASKDTSSMHKEIHKASEILNKHKTDQEIPQIITSFQINEKARYKNESVLVIQILDKGYYLVETELGMRLKAHGSWLKQIQKPPKNKFKPPKTIVPKPKEASLRLDLRGQRSEEALDLLDAFLNDALLGGFEEVLICHGKGSGILEKFVKEFLKNHPKVVSFSDAPINLGGSGVKIVKL

SEQ ID NO: 11520 - protein, 474 aa, Helicobacter pylori
MPFEAVIGLEVHVQLNTKTKIFCSCSTSFGETPNSNTCPVCLGLPGALPVLNKEVVKKAIQLGTAIEAHINQYSIFARKNYFYPDLPKAYQISQFEVPIVSDGKLEIDTKEGAKIVRIERAHMEEDAGKNIHEGSYSLVDLNRACTPLLEIVSKPDMKNSEEAIAYLKKLHAIVRFIGISDANMQEGNFRCDANVSIRPKGDEKLYTRVEIKNLNSFRFIAKAIEYEIERQSVAWENGRYNEEVVQETRLFDTAKGITLSMRNKEESADYRYFKDPDLYPVFIDEKLLKEAQKINELPGAKKIRYMKDFNLKEDDANLLVSDPLLAEYFESMLNLGVKAKTSVTWLCVELLGRLKAEVTLENCGISAHALGALAKRIDEGKISGKSAKDVLDRLLEEQGGDVDTLIEQMGLSQVNDTEAIVKVIEEVLKNNADKVLEYKSGKDKLFGFFVGQAMKNLKGANPSVVNAILKEKLD

SEQ ID NO: 11521 - protein, 365 aa, Helicobacter pylori
MNTLGRFLRLTTFGESHGDMIGGVLDGMPSGIKIDYDLLENEMKRRQGGRNIFTTPRKEDDKVEITSGVFEGFSAGTPIGFLIHNQRARSKDYDNIKNLFRPSHADFTYFHKYGIRDFRGGGRSSARESAIRVAAGAFAKMLLREIGVVCESGIIKIGGIEAKNYDFNHALKSEIFALDKEQEEAQKTAIQNAIKNHDSIGGVALIRARGAKTNQKLPIGLGQGLYAKLDAKIAEAMMGLNGVKAVEIGKGVESSLLKGSEYNDLMSQKGFLSNHSGGVLGGMSNGEEIIVKVHFKPTPSIFQPQRTIDIKGNECECLLKGRHDPCIAIRGSVVCESLLSLVLADMVLLNLTSKIEYLKTIYNEN

SEQ ID NO: 11522 - protein, 1167 aa, Helicobacter pylori
MDKKLINNEFVCKIVGTHKGLAKQDVIALDDENQEDNDLKNKADTFVSQRAISFCKSIQTSKNIKDSFETIMECYDEELKKKSFKNLKISIDHVDGTMNCKERLDKLENLNTFEPNICKVLSNARCLSEGVDVPALDSVIFFDGRSAMVDIIQAVGRVMRKAKNKKRGYIILPIALRESEIKNLDEAVKNTNFQNIWKVLKALRSHDSSLVDEAIFKEKIKIFGSDDASNPDDEEELQKDKTEQSSNDPKEAQKTLFDAILLQDLANAVYNVMPTKLGDRNYWENFAKKTGNIARTLNERLKELFGKNPEIFDNFLTSLRGNIHQSIKEEEALDMIISHIITKPIFDAIFGDNIKNPIAKALDKMVLKLSDLGLEGETKDLKNLYESVKTEAARAKSQKSQQELIKNLYNTFFKEAFRKQSEKLGIVYTPIEVVDFILRATNGILKKHFNTDFNDQSITIFDPFMGTGSFIARLLSKENDFISDEALKEKFQKGLFAFDIVLLSYYIALINITQAAQNRDSSLKNFKNIALTDSLDYLEEKNDKGVIPGFEYLFEDLKENKEIKTTMEKQNIRVIIGNPPYSSGAKSENDNNQNLSHPKLEKRVYETYGKNSTAQNKNSTRDTLIHSIRMASDLLKDKGVLGFVVNGSFIDSKSADGFRKCVAQDFSHLYALNLRGNARTSGEERKKQGDGIFDSGSRVTVAIIFFVKDKDAPNHTIFYYEVEDYLKREAKLNLLANFENLDSVPFKEITPNDKGDWINQRNDDFEKLIPLKRDKKSKIFNAIFDLNSNGVKTSRDPWVYNFSQKTLMQSVQNCIDTYNADLKRFNERFREAFKQRTAKDKGIKKSADRYKHLNDREITTDKTKIAWTDGLKNKLIKNENLPESGMERVRLALYRPFNKQWLYWDKNLINRQSQLPKIFPDKSARNVVINTGVGNGKDFSALVSDFISDFSLISPNQAYPLYYYDDLGNRYNAISGYALNLFRRHYKDNAITEEEIFYYIYAIFHHKGYLEKYKNSLAKEAPRIALSEDFKELSMLGKELAELHLNYESGEMHTSVKHNLLESAEMEGYYDVIQMKKDKKGDRIKYNHHITITQIPKKAFDYVVNGKSAIDWVIERYQITKDKDSLIENNPNHYAGGKYIFELLCRVITLSVKSVDLIEKISEKRFE

SEQ ID NO: 11523 - protein, 356 aa, Helicobacter pylori
MKHPLEELKDPVENLLLWIGRFLRYKCTSLSNSQVKDQNKVFECLNEFNHASINSNQLEKVCKKARNAGLLGINTYALPLLKFYEYAQKLSLKSLKNIDEVMLAEFLSIYTGGLSLATKKNYRIALLGLFSYIDKQNQDKNEKSYIYNITLKNISGVNQSAGNKLPTHLNNEELEKFLESIDKIEMSAKVRARNRLLIKIIVFTGMRSNEALQLKIKDFTLENGCYTILIKGKGDKYRAVMLKAFHIESLLKEWLTERELYPVKNDLLFCNQKGSALTQAYLYKQVERIINFAGLRREKNGAHMLRHSFATLLYQKRHDLILVQEALGHASLNTSRIYTHFDKDRLKEAASIWEEN

SEQ ID NO: 11524 - protein, 788 aa, Helicobacter pylori
MITVVKRNGRIEPLDITKIQKYTKDATDNLEGVSQSELEVDARLQFRDKITTEEIQQTLIKTAVDKIDIDTPNWSFVASRLFLYDLYHKVSGFTGYRHLKEYFENAEEKGRILKGFKEKFDLEFLNSQIKPERDFQFNYLGIKTLYDRYLLKDANNHPIELPQHMFMSIAMFLAQNEQELNKIALEFYEVLSKFEAMCATPTLANARTTKHQLSSCYIGSTPDNIEGIFDSYKEMALLSKYGGGIGWDFSLVRSIGSYIDGHKNASAGTIPFLKIANDVAIAVDQLGTRKGAIAVYLEIWHIDVMEFIDLRKNSGDERRRAHDLFPALWVCDLFMKRVLEDAMWTLFDPYECKDLTELYGQDFEKRYLEYEKDPKIIKEYINAKDLWKKILMNYFEAGLPFLAFKDNANRCNPNAHAGIIRSSNLCTEIFQNTAPNHYYMQIEYTDGAIEFFEEKELVTTDSNITKCANKLTSTDILKGKKIYIATKVAKDGQTAVCNLASINLSKINTEEDIKRVVPIMVRLLDNVIDLNFYPNRKVKATNLQNRAIGLGVMGEAQMLAEHQIAWGSKEHLEKIDALMEQISYHAIDTSANLAKEKGVYKDFENSEWSKGIFPIDKANNEALKLTEKGLFNHACDWQGLREKVKANGMRNGYLMAIAPTSSISILVGTTQTIEPIYKKKWFEENLSGLIPVVVPNLNVETWNFYTSAYDIDAKDLIKAAAVRQKWIDQGQSINVFLRIENASGKTLHEIYTLAWKLGLKSTYYLRSESPSIDEKSVLDRSVECFNCQ

SEQ ID NO: 11525 - protein, 391 aa, Helicobacter pylori
MNEVVVVAAKRSAVGSFLGSLKNVGARQMGVSVLKDALNASSLKPSDVDSVILGNVLGAGLGQNIARQIQLDAGIPNDRNAFSVNMVCGSSMKAIQLAHDSIVLGCDEVVVCGGVENMSAAPYLSFDMREGKRMGNANMIDSMIHDGLWDAFNDYHMGITADNVAQAYHISREDQDAFALQSQLKARAAINAGKFQEEITPIEIANKKGVVVFKEDEYPRDTTLESLAKLKPAFKKDGSVTAGNSSGINDGASIIILCSAKKAQKLGLKTMATIKGFGLGGCSPDIMGICPSIAIKNNLKNIKMNLNDINLFELNEAFAAQSIAVLKELELNPNIVNVNGGAIAIGHPIGASGARILVTLLHEMKRSGHGVGCASLCVGGGQGLSVVVEQK

SEQ ID NO: 11526 - protein, 308 aa, Helicobacter pylori
MQEIENLHQSVLLQEVLQAFTPLEEGILIDCTLGLGGHSKAILSQKPHLKLIGIDKDKFAQEIAKERLKEFEGRYNLLSGGFAKRFKEALEIHGERIKGVLVDLGVSSLQLDDDNRGFNFRSHALDMRMDLESELNAQKVINSYPVVALEKIFRDYGEIKEYKKIAHKIAERRAKKPFKDAKDLSEFLSSLSKNKKIHPATLVFQAVRIEVNSELEELKEFLQCARNLKEAILCVISFHSLEDALVKNAFKDYAKNCICDPSSFKCACSNNHALGAILTKKPITPSPEEIKNNRRSRSAKMRVFQFKP

SEQ ID NO: 11527 - protein, 240 aa, Helicobacter pylori
MDILKAEHLNKQIKKTKIVSDVSLEVKSGEVVGLLGPNGAGKTTTFYMICGLLEPSGGSVYLNDVDLAKYPLHKRSNLGIGYLPQESSIFKELSVEENLALAGESTFKNSKESEEKMESLLDAFNIQAIRERKGMSLSGGERRRVEIARALMKNPKFVLLDEPFAGVDPIAVIDIQRIIESLIGLNIGVLITDHNVRETLSVCHRAYVIKSGTLLASGNANEIYENALVRKYYLGENFKV

SEQ ID NO: 11528 - protein, 328 aa, Helicobacter pylori
MDFKNKKWLFLAPLAGYTDLPFRSVVKKFGVDVTTSEMVSSHSLVYAFDKTSKMLEKSPLEDHFMAQISGSKESVVKEAVEKINALDHVSGIDFNCGCPAPKVANHGNGSGLLKDLNHLVEILKVIRENTNKKITSVKVRLGFEKKIPKEIAHALNDAPVDYVVVHGRTRSDRYQKDKIDYESIALMKKILKKPVIANGEIDSVKKAFEVLQITQADGLMIGRATLRAPWIFWQIRNNTTELPAVVKKDLVLEHFDKMVEFYGDRGVIMFRKNLHAYAKGEMQASAFRNCVNTLTEIKSMRESIEEFFNQEMLQSEVPLWVELNQKSV

SEQ ID NO: 11529 - protein, 369 aa, Helicobacter pylori
MLLFTPGPVAINEEMRSSFSQPMPHHRTKDFEKIFQSVRENLKKMTGLEEVLLLSSSGTGAMEASVISLCQKELLFVNAGKFGERFGKIAKAHSIKAHELVYEWDTPAQVDGILNALKANPNIDAFCIQACESSGGLRHPVEKIAQAIKETNPNVFVIVDAITALGVEPLEITHVDALIGGSQKAFMLPPAMSLIALSQKAIDRIEERNVGFYFNLKSELKNQKNNTTSYTAPILHTLGLQRYFELVQNLGGFEALYQETKRVALASQKAVLALGLKIFPKSPSLSMTTIVSEHAKELKNLLKEKYQVQFAGGQEPYKDTLIRINHMGIIPVYKSAYALNALELALNDLDLREFDGMANTTFLKQYYEI

SEQ ID NO: 11530 - protein, 347 aa, Helicobacter pylori
MEFCVLFGGASFEHEISIVSAIALKGVLKDRIKYFIFLDENHYFYLIEESNMHSKYFAQIKEKKLPPLILTHNGLLKNSFLGAKIIELPLVINLVHGGDGEDGKLASLLEFYRIAFIGPRVEASVLSYNKYLTKLYAKDLGVKALDYVLLNEKNRANALDLIGFNFPFIVKPSNAGSSLGVNVVKEEKELIYALDSAFEYSKEVLIEPFIQGVKEYNLAGCKIKKGFCFSYVEEPNKQEFLDFKQKYLDFSRTKAPKANLSNALEEQLKENFKKLYNDLFDGAIIRCDFFVIENEVYLNEINPIPGSLANYLFDDFKTTLENLAQSLPKTPKIQVKNSYLLQIQKNK

SEQ ID NO: 11531 - protein, 318 aa, Helicobacter pylori
MKARGFKTKMRGFKIFSGSAHPAFGKEVSKHLGFPLSKAVIGKFSDGEINIQISESVRGKDIFIIQPTCVPVNDNLMELLVMVDALRRSSANSITAVLPYFGYARQDRKAAPRVPITAKMVANLMQEVGIERIITMDLHAGQIQGFFDVPVDNLYGSIVFRDYIRSKALKNPIIASPDVGGVTRARYFANQMGLDLIIVDKRREKANESEVMNIIGSAKERDVILVDDMIDTAGTICKAALALKEQGATSVMALGTHAVLSGNAIKRIKESALDEVVVTNSIPLVQKCDKITTLSVASLFAEVIRRIYHNESVQSLFT

SEQ ID NO: 11532 - protein, 529 aa, Helicobacter pylori
MSSGLIYISLEVLVACLITALIMYYVMKKIYYARGQAILKGASAKAKLMEFQAKSFVEAEEMRMKSQECKLQQQYENKNLQLQTHFDKKEAHLKHLEAQHKEFVRDEKRYLEKEKKELEKERQILEQERENFKKQRAICKEAQAKALDAMLNYMAYTKDEIKSMILEQLEEELEAQKSALIRRYEKEAKEEGKKKSYAILAEATARFAGDYATENLTSRIALPCSDYVGRVIGKDGKNIEAFKKISGVDIEFSEDSSELCLSSFNIYRREVASETIKILIEDGRIQPNRIEEVYHRVARNMEKELLSEGESVVLELELGTMEDELKILIGKMRYRFSFGQNALQHSKEVALLAGLIAEQLGGDKKLARRAGILHDIGKALTQELGRDHVNLGVEVCKRHKEDPVVINAIYAHHGHEEIMSVECASVCAADALSAGRPGARRKSDEEYAKRMQALEEIALEFDGVEKAYAMESGRELRVIVKSNQVRDNQVPIIARKIAKRIEESTQYVGEVGVQVVRENRFKTTATLKQ

SEQ ID NO: 11533 - protein, 469 aa, Helicobacter pylori
MLVRLGVVACLFWLHYAYATTLKITNIVPFGSSSVKMVFNQEVKKFKEVSLKNFKSYLELEAVLTIPKKHYQFSKQSFITIAQFSPKLVRVVIGYAPKMTYEVKILKDKLYVSIMEKKPLIRHQMTPKPPKHHALKHQTPKPTPKPIKKEAKKAKEKTTKHAHSKHAHSPLNERSAKKEIPKKEIPKKEIPKKEIPKKEIPKKEIPKKEIPKKEIPKKEAENESKNQIFIAEKNDTWIKTKRKKHKKIVLDAGHGGKDCGAMSANLVCEKDIVLEVVKFLHKELKKRGYSVLLTRDKDIYIDLVARTELANKKGADLFISVHANSIPKRSTSNAHGIETYFLSTARSERARKVAEQENKDDVNLMDYFSKSLFLNSLNTQRLIVSNKLAIDVQYGMLQSVRKNYPDVVDGGVREGPFWVLAGALMPSILIEIGYNSHAIESKRIQSKPYQKILAKGIADGIDSFFSKND

SEQ ID NO: 11534 - protein, 402 aa, Helicobacter pylori
MEQKISVALKEIKRGANEIIGLEYIEKLVRKYYETNERFIVKAGFDPTAPDLHLGHTVLIQKLALLQQYGARVKFLIGDFTAMIGDPTGKNETRKPLNREQVLENAKTYKEQIYKILDQKHTEVCFNSAWLDALGAKGMIELCAKFSVARMLERDDFAKRYKENRPISIVEFLYPLLQGYDSVAMGADIELGGNDQKFNLLVGRFLQRAYGLNKEQSIITMPLLEGLDGVQKMSKSLGNYVGITEEPNAMFGKIMSVSDDLMWRYYTLLSAKTLEEIEDLKHGILHQTLHPKAVKEDLASEIVARYYDNDQAFKAKEQFSKVFSANLLPEILLESDFDEGVGVLDVLKQIGFCPSTSQARRDIQGGGVKINQEVVKDESYRFVKGNYVIQLGKKRFMKLNIN

SEQ ID NO: 11535 - protein, 852 aa, Helicobacter pylori
MKDFLEDYKKSVLERKSEGIPPLPLNAKQVEAVVEILMKDPTNAAFAKELLIHRVSPGVDEGAKVKAEFLAQLSQKKLECPHISALEATTLLGTMLGGYNVEPLIVGLESQDKNIAKESAKALKTTLLVYGSFDKIAAMSKTNALAKEVLESWANAEWFLNKEPLNECIEACVFKIDGETNTDDLSPASDAFTRSDIPLHAKAMLKNRIENYEQRIEAIKTKGVPVAYVGDVVGTGSSRKSATNSIMWHFGKDIPFVPNKRSGGIVIGGVIAPIFFATCEDSGALPIVADVKDLKEGDIIKIYPYKGEITLNDKVVSTFKLEPETLLDEVRASGRIPLIIGRGLTNKARKFLGLGESEAFKKPSAPKSDAKGYTLAQKIVGHACGVKGILPGAYCEPKVTTVGSQDTTGAMTRDEVKELASLKFDAPFVLQSFCHTAAYPKPSDVSLHATLPGFITQRGGVALHPGDGVIHTWLNRMGLPDTLGTGGDSHTRFPLGISFPAGSGLVAFAAVTGTMPLNMPESVLVRFKGEMNPGITLRDLVNAIPYYAIKKGLLTVEKKGKINVFNGRILEIEGLPDIKMEQAFELSDASAERSAAACVVRLNKEPMIEYLKSNIKLIDEMIASGYEDKETLKKRRDAMQAWVDKPVLLEPDSNAQYAAVIEIDVAEITEPILACPNDPDDVATLSEVLADTTGKRPHAIDEVFIGSCMTNIGHFRAFGEIVKNAPPSQARLWVVPPSKMDEQELINEGYYAIFGAAGARTEVPGCSLCMGNQARVRDNAVVFSTSTRNFDNRMGRGAKVYLGSAELGAACALLGRIPTKEEYMNLVSEKLESQKDKIYRYMNFNLMENFRL

SEQ ID NO: 11536 - protein, 865 aa, Helicobacter pylori
MIKAIIGKIIGTRNDRWIKQYKKKVLAINALEPTYEKMSDVELQNAFEELKKRVRSVEKDLQEKTLLEVLPESFAITREASKRILKMRHFDVQLIGGMVLNDGKIAEMKTGEGKTLVATLAVALNAMKGESVYVVTVNDYLAHRDSKEMEPLYQFLGYSVGTITASVRDDDERLEIYSKDIVYGTNNEFGFDYLRDNMKYSLEHKVQKSHAFAIVDEVDSILIDEARTPLIISGPVDRRMENYNKADEVAKSMQVEVDFTIDEKNRAILITEEGIKKAENLFGVDNLYKIENAALSHHLDQALKANYLFFIDKDYIVANNEVVIVDEFTGRLSEGRRFSEGLHQALEAKEGVSIKEESQTLADITFQNYFRMFSKLSGMTGTAQTEATEFLEIYNLEVVSIPTNLAIKRKDLNDLIYKSEKEKFDAVILKIKELHDKGQPVLVGTASIEKSETLHALLKKERIPHTVLNAKQHTKEAEIIKDAGLKGAVTIATNMAGRGVDIKLTDEVKELGGLYIIGTERHESRRIDNQLRGRSGRQGDPGVSQFYLSLEDNLLRIFGSDRIKGVMEKLGLKDGEHIESKLVTRAVENAQKKVENLHFESRKHLLEYDDVANEQRKSVYKFRDELLDINYDISAKIAENREYALNQIFSKLKAFDHQNLSEEELLGLKNILKEDFNASVELEDLEKASPIEKFVAEKLKSDYENKMKALDSEQRSRIERIVYLQILDNAWREHLYTMDNLKTGINLRGYNQKDPLVEYKKESYNLFLELIGDIKIEAIQTFSKIQFENEQDSSDAERYLDNFSEEREHESVTYRHEEALDEDLNVAVKAFSKTPKRNEPCPCGSGKKYKDCCAKSGPKKGLFAK

SEQ ID NO: 11537 - protein, 686 aa, Helicobacter pylori
MQEYHIHNLDCPDCAAKLERDLNKLDYVKKAQINFSTSKLFLDTSDFEKVKAFIKQNEPHLSLSFKEAAEKPLSFTPLIATIAVFLGAILILHLEPSPFIEKAVFVVLALVYLISGKDVILGAFRGLRKGQFFDENALMLIATIAAFCVGAYEESVSIMVFYSAGEFLQILAIARSKKSLKALVDVAPNLAYLKKGDTLVSVAPEDLRINDIVVVKVGEKVPVDGVVIKGESLLDERALSGESMPVNVSERSKVLGGSLNLKAVLEIQVEKLYKDSSIAKVVDLVQQATNEKSETEKFITKFSRYYTPSVLFIALMIAVLPPLFSMGSFDEWIYRGLVALMVSCPCALVISVPLGYFGGVGAASRKGILMKGVHVLEVLTQTKSIAFDKTGTLTKGVFKVVDIVPQNGHSKEEVLHYASCSQLLSTHPIALSIQKACEEMLKDDKHQHDIKNYEELSGMGVKAQCHTDLIIAGNEKMLDQFHIAHSPSPENGTIVHVAFNQTYIGYIVISDEIKDDAIECLRDLKAQGIENFCILSGDRKSATESIARTLGCEYHASLLPEEKTSVFKTFKERYKAPAIFVGDGINDAPTLASADVGIGMGKGSELSKQSADIVITNDSLSSLVKVLAIAKKTKSIIWQNILFALGIKAVFIVLGLMGVASLWEAVFGDVGVTLLALANSMRTMRA

SEQ ID NO: 11538 - protein, 176 aa, Helicobacter pylori
MQTIHIGVLSASDRASKGVYEDLSGKAIQEVLSEYLLNPLEFHYEIVADERDLIEKSLIKMCDEYQCDLVVTTGGTGPALRDITPEATKKVCQKMLPGFGELMRMTSLKYVPTAILSRQSAGIRNKSLIINLPGKPKSIRECLEAVFPAIPYCVDLILGNYMQVNEKNIQAFRPKQ

SEQ ID NO: 11539 - protein, 333 aa, Helicobacter pylori
MPNHQNMLDNQTILITGGTGSFGKRFVRKVLDTTNAKKIIVYSRDELKQSEMAMEFNDPRMRFFIGDVRDLERLNYALEGVDICIHAAALKHVPIAEYNPLECIKTNIMGASNVINACLKNEISQVIALSTDKAANPINLYGATKLCSDKLFVSANNFKGPSQTQFGVVRYGNVVGSRGSVVPFFKKLVQNKASEIPITDIRMTRFWITLDEGVSFVLKSLKRMHGGEIFVPKIPSMKMIDLAKALAPNIPTKIIGIRPGEKLHEVMIPKDESHLALEFEDFFIIQPTISFQTPKDYTLTKLHEKGQKVAPDFEYSSHTNNQWLEPDDLLKLL

SEQ ID NO: 11540 - protein, 217 aa, Helicobacter pylori
MFDANCLKLMFVAGSQDFYHIKGDRTNALLDTLELALQSKITAFQFRQKGDLALQDPVEIKRLALECQKLCKKYGTPFIINDEVRLALELKADGVHVGQEDMAIEEVVTLCQKRLFIGLSVNTLEQALKARHLDHIAYLGVGPIFPTPSKKDAKEVVGVNLLKKIHDSGVEKPLIAIGGITTDNASKLQKFSGIAVISAITQAKDKALAVEKLLKNA

SEQ ID NO: 11541 - protein, 259 aa, Helicobacter pylori
MLKELRQKRPLVHNITNYVVAQFVANGLLALGVSPLMSDAIAEMPDLAKISDALAINIGTLNERTILCAKEAIKRYKALNKPIVLDPVGCSASALRYDTSLELLESKGISTLRGNAAELGSLVGISCESKGLDSKHSATPIEIVKRAAQKYSVIAVMTGKTDYVSDGKKVLSITGGSEYLAAITGAGCLHAAACASFLSLKKDPLDSMVQLCAFYKQAAFSAQKKALENNGSNGSFLFYFLDALSLPIELENSLIKEEL

SEQ ID NO: 11542 - protein, 228 aa, Helicobacter pylori
MVFDRTTSVREKKAAKALGIVGIVFFILFGIVISGVASQKEWVQQLDLFFIDLIRNPAPIQGSTWLSFVFFSTWFAQSKLTTPIALLIGLWFGFQKRIALGVWFFFSILLGEFTLKSLKLLVARPRPVTNGELVFAHGFSFPSGHALASALFYGSLALLLCYSNANNRIKTIGAIILLFWIFLMAYDRVYLGVHYPSDVLGGFLLGIAWSCCSLALYLGFLKRPYKAA

SEQ ID NO: 11543 - protein, 325 aa, Helicobacter pylori
MKVFDYEDVQLIPNKCIVNSRSECDTTVILGKHAFKMPIVPANMQTIINESIAEFLAENGYFYIMHRFNGSARIPFVKKMKERQLISSISVGVKKEECLFVEELAKQGLTPDYITIDIAHGHSNSVIEMIQRIKTRLPETFVIAGNVGTPEAVRELENAGADATKVGIGPGKVCITKIKTGFGTGGWQLAALRWCAKAARKPIIADGGIRTHGDIAKSIRFGATMVMIGSLFAGHEESSGETKIENGIAYKEYFGSASEFQKGEKKNIEGKKIWIQHKGSLKNTLIEMHQDLQSSISYAGGRDLEAIRKVDYVIVKNSIFNGDTI

SEQ ID NO: 11544 - protein, 255 aa, Helicobacter pylori
MVLEVKNLSFKYSQKLILDKLSFSVPKNSITSILAPNGSGKTTLLKCLLGLLKPLEETEIKACNKDILPLKPYEKAKLIAYIPQVEYYAFNFSVLDFVLMGKATHLNLFAMPKAKHIKEATSVLERLDLESLKDQGINDLSGGQRQMVLLARSLLQRTPLLLLDEPTSALDLKNQALFFDAIKDEMKKRELSVLVNIHDPNLVARHSTHVVMLKDKKLFLQASTPIAMTSHNLSALYDTPLEAIWHDDKLVVYAL

SEQ ID NO: 11545 - protein, 326 aa, Helicobacter pylori
MLKTYHIALACVILAVVVLLFGGESLSLEEWQEVCLNVKNHFLHNEELSSLSVIILEIRLPRVILALLVGASLSGSGVVMQTILRNPLVDPFLLGISSGAMLGVAMAIAVVESNIAILAFFGAILPSLAVLAMNRVLGNSVLSLVLSGVVLSAFLSALAGAIKFFVIPQKAQAIVVWLLGSLSLSSYKDCLIAFIGLSLGFIPLFLLRWRINLLSLSDAQSLSLGINPVLLRSLCLVCVSVASALAVSVSGTIGWIGLVIPHVARLFFGANLQKLLLSSLLMGAFFLLLADVVAKTITPYDLPVGIATSVLGAPFFLWLLFRTRGV

SEQ ID NO: 11546 - protein, 519 aa, Helicobacter pylori
MQSLWIYPEDTEVLGAACKSLLKALKPRYQKIALFSPISGGCEGFGECESLSSLEVHSAIDKQKALELVSTAQEELLFETILKRYDELQSTHDFVINLGYAPKFFLNALLDLNTILAKHLNAPVVAVAQTSLDHLKAMHSHILKKEAPFAIGLFVGETLEKPHFLSASLCKQQCELEASAIENLLQTKSEIITPLAFQRSLEKKAKKQIKKVVLPESEDERILKAAHRLNLMGAVGLILLGDKEAINSQAKNLNLNLENVEIINPNTSHYREEFAKSLYELRKSKGLSEQEAERLALDKTYFATMLVHLGYAHAMVSGVNHTTAETIRPALQIIKTKPGVSLVSSVFLMCLDTQVFVFGDCAIIPNPSPKELAEIATTSAQTAKQFNIAPKVALLSYATGNSAQGEMIDKINEALTIVQKLDPQLEIDGPLQFDASIDKGVAKKKMPNSQVAGQASVFIFPDLNAGNIAYKAVQRSAKAVAIGPILQGLNKPINDLSRGALVEDIVNTVLISAIQAQDY

SEQ ID NO: 11547 - protein, 303 aa, Helicobacter pylori
MSNPNLSFYCNECERFESFLKNHYLHLEGFHPYLEKAFFEMVLNGGKRFRPKLFLAVLCSLVGKKDYSNQQTEYFKIALSIECLHTYSLIHDDLPCMDNAILRRNHPTLHAKYDETTAVLIGDALNTYSFELLSNSLLESRIIVELVKILSANGGIKGMILGQALDCYFENTPLNLEQLTFLHEHKTAKLISASLIMGLVASGINDEELLKWLQAFGLKMGLCFQVLDDIIDVTQDEKESGKTTHLDSAKNSFVNLLGLKKASGYAQTLKTEILNDLNALEPTYLSLQENLNALLNTLFKGKT

SEQ ID NO: 11548 - protein, 377 aa, Helicobacter pylori
MLKRASFVEVNTHSLRHNFNAVKNIVPKDACVMAVVKANAYGAGAIKASEIFLQEGANYLGVATLDEALELRSHFSQTPILILGYSPNTNASMLIDNDLSAMVFSLEQAEVFSQMALKSQKRLKVHLKIDTGMHRLGLEPTFKSIETIKKIRALKGLEVEGIFTHLSNADSNIKTHAKNQMKVFNAFLEQLLDQKIEFQYRHAYNSAGILSLCNGNENRLLNLYRPGIMLYGFYPSNEMKESSQTILKNVISLKARIVQIKRVKKGEFIGYGEHFYTNEETLVGVLALGYADGLVRALGNRIQVAINNQLAPLIGKVCMDQCFVKLNDIEAKEGDEVILFGDKSTKANDASEIATLLNTIPYETISTLSKRLERVYV

SEQ ID NO: 11549 - protein, 267 aa, Helicobacter pylori
MNTHLKQLIEISHLDKEIDSLEPLIREKRKDLDKALNDKEAKNKAILNLEEEKLALKLQVSKNEQTLQDTNAKIASIQKKMSEIKSERELRSLNIEEDIAKERSNQANREIENLQNEIKHKSEKQEVLKKEMLELEKLALELENLVENEVKNIKETQQIIFKKKEELVEKTEPKIYSFYERIRRWAKNTSIVTIKKQACGGCFIRLNDKIYAEVLTSGDMITCPYCGRILYAESTHESNAQPPKESQPKESQEESQEESQEESQESV

SEQ ID NO: 11550 - protein, 298 aa, Helicobacter pylori
MQDFSSLLLKLQEYWKDQGCLVIQPYDIPAGAGTFHPATLLRSLDKKPWNVAYVAPSRRPTDGRYGENPNRLGSYYQFQVVIKPSPSNIQELYLKSLEVLGINLNEHDIRFVEDNWESPTLGAWGLGWEVWLDGMEVTQFTYFQQVGGIPCSPIPVEITYGLERLTMYVQKVENILEIEWAKKDNESVRYAQVHLESEYEFSKYHFEVASVERLLEMFKNAQAEALHCLENKLPLPAYDLVMLCSHFFNILDARKAISVAERQNYILQIRDLAKGCAVLYKEQEEEREERLKNALTKA

SEQ ID NO: 11551 - protein, 312 aa, Helicobacter pylori
MEIAVFGGGAWGRALAFAFGEKNEVKIISRRDLNEPLKKLNDALISKGSAPIEQVDLERGLKAALYVIAISVQHLREWFQNASLPKNAKVLIASKGIEVLNKAFVSEIAKDFIDPNALCFLAGPSFAAEIIQGLPCALVIHSNNQALALEFANKTPSFIRAYAQQDIIGGEIAGAYKNVIAIAGGVCDGLKLGNSAKASLLSRGLVEMQRFGAFFGGKTETFLGLSGAGDLFLTANSILSRNYRVGLGLAQNKPLEVVLEELGEVAEGVKTTNAIVEIARKYGIYTPIASELALLLKGKSVLESMNDLIRRA

SEQ ID NO: 11552 - protein, 93 aa, Helicobacter pylori
MQIDDALLQRLEKLSMLEIKDEHKESVKGHLAEVLGFVENIFALETNNLKTDTHLSTPLREDEPKSQPHIAKEILSQNKHSQDHYFVVPKIIE

SEQ ID NO: 11553 - protein, 385 aa, Helicobacter pylori
MVHQSEMENYNIGQASIEEVSDPAYKGAKIVVVGVGGGGSNMIKHLVEYGVHQDVTPIATNTDGQHLKNNPAPVKILLGKESTGGLGAGGVPDIGKKAAEESADEIREAIKDAKLVIVSTGLGGGTGTGATPTIVKIAKEVGALTIAIVTKPFKYEGNQKRKRAEEGLKELEQSSDSILVIPNDKILLTMKKNASTTECYREVDDVLVRAVSGISTIITKPGNINVDFADLKSALGFKGFALMGIGEATGEDSAKLAVQNAIQSPLLDDASIEGAKSIIVFFEHHPDYPMMAYSQACDFIQDQAHQDVDVKFGQHTSENIPIDHVRVTIIATGSERNSNGAGLESIATPSQPVVKPTRKVGNGEYLRIPTEEELSIPTTIRIQQD

SEQ ID NO: 11554 - protein, 656 aa, Helicobacter pylori
MQKSLITTPIYYVNDIPHIGHAYTTLIADTLKKYYTLQGEEVFFLTGTDEHGQKIEQSARLRNQSPKAYADSISAIFKNQWDFFNLDYDGFIRTTDSEHQKCVQNAFEIMFEKGDIYKGTYSGYYCVSCESYCAVSKVDNTDSKVLCPDCLRETTLLEEESYFFKLSAYEKPLLEFYAKNPEAILPIYRKNEVTSFIEQGLLDLSITRTSFEWGIPLPKKMNDPKHVVYVWLDALLNYASALGYLNGLDNKMAHFERARHIVGKDILRFHAIYWPAFLMSLNLPLFKQLCVHGWWTIEGVKMSKSLGNVLDAQKLAMEYGIEELRYFLLREVPFGQDGDFSKKALVERINANLNNDLGNLLNRLLGMAKKYFNYSLKSTKITAYYPKELEKAHQILDNANSFVPKMQLHKALEELFNIYDFLNKLIAKEEPWVLHKNNESEKLEALLSLIANTLLQSSFLLYAFMPKSAMKLASAFRVEITPNNYERFFKAKKLQDMVLQDTEPLFSKIEKIEKIEKIEKIEKIEKGEEALAEKAEKKEKEKAPPTQENYISIEDFKKVEIKVGLIKEAQRIEKSNKLLRLKVDLGENRLRQIISGIALDYEPESLVGQMVCVVANLKPAKLMGEMSEGMILAVRDNDNLALISPTREKIAGSLIS

SEQ ID NO: 11555 - protein, 508 aa, Helicobacter pylori
MILVLDFGSQYTQLIARRLRESGIYAEIVPFFESVENIQKKAPKGLILSGGPASVYAKDAYKPSEKIFDLNLPILGICYGMQYLVDFFGGVVAYANEQEFGKAILEIVQNSVIFEGVKIKSLVWMSHMDKVIELPKGFTTLAKSPNSPYCAIESDKIFGLQFHPEVIQSEEGGKILENFALLVCGCEKTWGMQHFAQREIVRLKEKIANAKVLCAVSGGVDSTVVATLLHRAIKDNLIAVFVDHGLLRKNEKEKVQAMFKDLQIPLNTIDAKEVFLSKLKGVSEPELKRKIIGETFIEVFEKEAKKHHLKGKIEFLAQGTLYPDVIESVSVKGPSKVIKTHHNVGGLPEWMDFKLIEPLRELFKDEVRLLGKELGVSQDFLMRHPFPGPGLAIRILGEINENKIKRLQEADAIFIEELKKANLYDKVWQAFCVLLNVNSVGVMGDNRTYENAICLRAVNASDGMTASFSFLEHSFLEKVSNRITNEVNGINRVVYDITSKPPGTIEWE

SEQ ID NO: 11556 - protein, 764 aa, Helicobacter pylori
MKLSVNDLNVFVNTPKDIAKLCEDLSRLGLEVESCIPCIAPKNVVVGKVLEKAPHKNAEKLSVCQVDVGKEVLPVVCGAKNVAPNQFAPVALKGAIIGSTTIAKTELRGVESHGMICSSIELGFPKINDGILELDESVGELVLGKELHEYAPFNTHVLEISLTPNRGDCLSVLGIAREISAFYHTPLKPIKALNFTPTSDLITLSADENIESHLAYYLICNHSLKTPLNIKLSLAHNNALSENDLNNFIEFSAHFSGVILNAYSLNKTPIDLIIKNDENNLESVYINHQKRSTIVIKHQDQKDLSECLLLEASYTDPVSLSLKLHALKDKTLQKDNALVYRSTRGSNPNLSDGLNFLSAHLKAAILESKQTEHSLKDCALTFQLEDITEILGLVIEAEKIQNILKNLGFKVSTKEPNSKPQILEVIVPNFRHDIKTIQDIAEEILRFVGIDNLVSKPLHCVSSKNSNPHYDTHRFFENLKHKALACGFKEVIHYVFYSKEKQQKLGFEVLEDPLELQNPITTELNTLRTSLVCGLLDASLRNKNLGFKSIALYEKGSVYNSKREEIQKLGFLVSGLQKKESYPHAKGKAWDFYSFAECVSRIIGDFSLEKLTTQTPINHPYQSAKIIQNNEIIGVIAKIHPKVIQELDLFESYYAEIDASKLKRPAMLLKPFSIYPSSVRDLTLIIDENTAFSKIKKALKDAQIPNLSEILPLDIFKESGNTIALSVRCVIHSLEKTLNDEEVNSAVQKALEILEKEFNARLKG

SEQ ID NO: 11557 - protein, 524 aa, Helicobacter pylori
MYQVAICDPIHAKGIQILEAQKDIVLHDYSKCPKKELLEKLIPMDALITRSMTPITSDFLKPLTHLKSIVRAGVGVDNIDLESCSQKGIVVMNIPTANTIAAVELTMAHLINAVRSFPCANDQIKHQRLWKREDWYGTELKNKKLGIIGFGNIGSRVGIRAKAFEMEVLAYDPYIPSSKATDLGVIYTKNFEDILQCDMITIHTPKNKETINMIGAKEIERMKKGVILINCARGGLYNEDALYEALETKKVRWLGIDVFSKEPGIHNKLLDLPNVYATPHIGANTLESQEEISKQAAQGVMESLRGSSHPHALNLPMQAFDASAKAYLNLAQKLGYFSSQIHKGVCQKIELSLCGEINQFKDALVAFTLVGVLKPVVGDKINYINAPFVAKERGIEIKVSLKESASPYKNMLSLTLNAANGAISVSGTVFEEDILKLTEIDGFHIDIEPKGKMLLFRNTDIPGVIGSVGNAFARHGINIADFRLGRNTQKEALALIIVDEEVSLEVLEELKNIPACLSVHYVVI

SEQ ID NO: 11558 - protein, 455 aa, Helicobacter pylori
MNKENKKVEKKELSRILIANRGEIALRAIQTIQEMGKESIAIYSIADKDAHYLNTANAKVCIGGAKSSESYLNIPAIISAAELFEADAIFPGYGFLSENQNFVEICSHHSLEFIGPSAKVMALMSDKAKAKIVMKEAGMPVIEGSDGLLKSYQEAEEIADKIGYPVIIKAAAGGGGRGMRVVGDKSKLKNLYLAAETEALSAFGDGSVYLEKFINKPKHIEVQILADKHGNVIHVGERDCSVQRRQQKLIEETPAVVLEESVRKRLLETAIKAAKYIGYVGAGTFEFLLDSNMKDFYFMEMNTRLQVEHTISEMVSGLNLIEWMIKIAQGEELPKQESFSLKGHAIECRITAEDPKKFYPSPGKITEWIAPGGVNVRLDSHAHANYVVPTNYDSMIGKLIVWGENRERAIAKMKRALKEFKVEGIKTTIPFHIEMLENADFRQAKIHTKYLEENF

SEQ ID NO: 11559 - protein, 264 aa, Helicobacter pylori
MMNEIIAVANQKGGVGKTTTAVNLAASLAAHEKKILLIDFDPQANATSSLGFRRDKIDYDIYHVLIGRKQISQVILKTQMPFLDLVPSNLGLAGFEKTFYDSQDENKRGELMLKNALGSVVKLYDYIIIDSPPALGPLTINSLSAAHSVIIPIQCEFFALEGTKLLLNTIRMLQKSTNPKLKIRGFLPTMHVPQLNLTKGVLAELFKYFDSEFFRDSATGEYIMIPKSVKLAESPSFGKPILLYDIKSNGSIAYQKLAQSILQG

SEQ ID NO: 11560 - protein, 118 aa, Helicobacter pylori
MKNRYIQQFEDAQLKDKSMPTFKAGDTLRLGITIKEGEKTRTQYFEGVCIAIRGNGVDKTFCVRKIGANNIGVEKIFPFYSESLASVEVLRVGRVRRAKLYYLRDRRGKAARIKEVRH

SEQ ID NO: 11561 - protein, 229 aa, Helicobacter pylori
MKFSVLTLFPQLILPYFEDSILKRALEKNLFELEVLNLRDFSANKYQKADHTLIGGGAGQILDPEMIENALHSVKNPKHTIFLSAVGKPFKQIDAMRLAQKKHVVLVCGRYEGFDERSIELGADEVFCIGDFILTGGELGALCLIDSIARHIQGVLGNAQSLENESFENNYLETPNFANAVFKSKEINKIPAPLEYSKGNHAKIKQLKLDLSKLRTKFYRLDLFKQHKS

SEQ ID NO: 11562 - protein, 448 aa, Helicobacter pylori
MFQALSDGFKNALNKIRFQDDEKALDRALDELKKTLLKNDVHHKVARELLKKVESQTKAGGIGKQQFLDALEKSLLEILSAKGSSGFTFAQTPPTVVLMAGLQGSGKTTTTAKLAHYLKTKNKKVLLCACDLQRLAAVEQLKVLGEQVGVEVFHEENKSVKEIANNALKRAKEAQFDVLIVDSAGRLAIDKELMQELKEVKEVLNPHEVLYVADALSGQDGVKSANTFNEEIGVSGVVLSKFDSDSKGGIALGITYQLGLPLRFIGSGEKIPDLDVFMPERIVGRLMGAGDIISLAEKTASVLNPNEAKDLSKKLKKGQFTFNDFLNQIEKVKKLGSMSSLISMIPGLGNMASALKDTDLESSLEVKKIKAMVNSMTKKERENPEILNGSRRKRIALGSGLEVSEINRIIKRFDQASKMAKRLTNKKGISDLMNLMSQAKNQTPPKMR

SEQ ID NO: 11563 - protein, 872 aa, Helicobacter pylori
MKQEPTTYQPEEIEKKIYEICSHRGYFEINGNEKIQEKGKRFCLMMPPPNVTGILHIGHALTLSLQDILVRYKRMDGYKTLYQPGLDHAGIATQNVVEKQLLSQGVKKEDLGREKFIQKVWEWKEKSGGAILEQMKRLGVSTAFSRTRFTMDKGLQRAVKLAFLKWYEKGLIVQDNYMVNWCTKDGALSDIEVEYEERKGALYYIRYYLENQKDYLVVATTRPETLFGDSAIMVNPNDERYKHLVGQQVILPLINRTIPIIADAHVEMGFGTGCVKVTPGHDFNDYEVGKRHHLETIKIFDEKGILNAHCGEFENLERLEARDKVVAALKENALLEKIEEHVHQVGHCYRCHNVVEPYVSKQWFVKPEIAQSSIEKIQQGLARFYPSNWINNYNAWMRELRPWCISRQLFWGHQIPVFTCENNHQFVSLDTPLSCPTCKSEKLEQDKDVLDTWFSSGLWAFSTLGWGQEKSDLFNESDLKDFYPNTTLITGFDILFFWVARMLFCSESLLGELPFKDIYLHALVRDEKGEKMSKSKGNVIDPLEMIEKYGADSLRFTLANLCATGRDIKLSTTHLENNKNFANKLFNAASYLKLKQESFKDKERLNEYQTALGRYAKSRLNLVTKEVRNALDNYRFNDATTLLYRFLWGEFCDWFIEFSKVENEAIDELGSVLKEALKLLHPFMPFISESLYHKLSNTELENAHSIMVMPYPKEIAQDEKLEHEFEVIKDCIVSLRRLKIMLETPPIVLKEASVGLREKIENTERLQNYAQKLAKLEKVSVITYKPLKSVSDVGEFCQTYADLENLDLSPLIARLKKQLEKLEKEKLKLNLHNENFVKNAPKSVLEKARESLKTLLEKEGKIQQELDLLEQP

SEQ ID NO: 11564 - protein, 353 aa, Helicobacter pylori
MKFALTGGGTGGHLSIAKALAIELEKQGIEAIYLGSTYGQDKEWFENSPLFSERYFFNTQGVVNKSFFKKIRSLFLQAKAAFKAKEILKKHQITHTISVGGFSAGPASFASLLNKIPLYIHEQNAIKGSLNRYLSPKAKAVFSSYAFKDKGNHVLTSYPVQNAFFDHARTRTEIKHILFLGGSQGAKAINEFALLNAPKLTKQGIKITHICGPNSYEQVRFFYQELGLLDKIELFAFHNNITEVMHRADLCVSRAGASSVWELCANGLPTIFIPYPFASNNHQYYNVLEFEKENLCYVVPQNELLPKKLFEVIRKLNQKDDQGNKNLTTISAKLQQKIAKDGAKTIIETILSA

SEQ ID NO: 11565 - protein, 217 aa, Helicobacter pylori
MALDWDFMLHSIPAFFKGLKLTLYISFFGILLSLLVGFLCAIVLYFKTRFLSPVVYIYGEIARNTPLLIQLFFLYYGLNEIGLSALECAILALGFLGGGYMSQSFLLGFKSLASIQRESALSLGFSPLKMMYYIILPQSLSVSMPSIGANVIFLLKETSVVGAIALTDIMFVAKDLIGIYYKTTESLLMLSLTYLIALLPLSALFVILERSFKKKVA

SEQ ID NO: 11566 - protein, 391 aa, Helicobacter pylori
MMITKQSYQRFALMRVFVFSLSAFIFNTTEFVPVALLSDIAKSFEMESATVGLMITAYAWVVSLGSLPLMLLSAKIERKRLLLFLFALFIFSHILSALAWNFWVLLLSRMGIAFAHSIFWSITASLVIRVAPRNKKQQALGLLALGSSLAMILGLPLGRIIGQILDWRSTFGVIGGVATLIMLLMWKLLPHLPSRNAGTLASVPILMKRPLLVGIYLLVIMVISGHFTTYSYIEPFIIQISQFSPDITTLMLFVFGLAGVVGSFLFGRLYAKNSRKFIAFAMVLVICPQLLLFVFKNLEWVIFLQIFLWGIGITSLTIALQMRVLQLAPDATDVASAIFSGSYNVGIGSGALFGSIVIHQLGLEYIGFVGGALGLLALFWLRFITIKFKKT

SEQ ID NO: 11567 - protein, 346 aa, Helicobacter pylori
MKTYNVAIVGASGAVGQELIKGLENSFFPIKKFVPLASARSAGKKIRAFNKDYEILETTHEVFEKEEIDIAFFSAGGSVSEEFAISASKTALVIDNTSFFRLNKDVPLVVPEINAQEIFNAPLNIIANPNCSTIQMTQILNPLHLHFKIKSVIVSTYQAVSGAGNKGIESLKNELKTALEHLEKDPAIDLNQVLQAGAFAYPIAFNAIAHIDTFKENGYTKEELKMVHETHKIMGVDFPISATCVRVPVLRSHSESLSIAFEKEFDLKEVYEVLKNAPSVVVCDDPSHNLYPTPLKASHTDSVFIGRLRKDLFDKKTLHGFCVADQLRVGAATNALKIALHYIKNA

SEQ ID NO: 11568 - protein, 692 aa, Helicobacter pylori
MARKTPLNRIRNIGIAAHIDAGKTTTSERILFYTGVSHKIGEVHDGAATMDWMEQEKERGITITSAATTCFWKDHQINLIDTPGHVDFTIEVERSMRVLDGAVSVFCSVGGVQPQSETVWRQANKYGVPRIVFVNKMDRIGANFYNVENQIKQRLKANPVPINIPIGAEDTFIGVIDLVQMKAIVWNNETMGAKYDVEEIPSDLLEKAKQYREKLVEAVAEQDEALMEKYLGGEELDIEEIKKGIKTGCLNMSFVPMLCGSSFKNKGVQTLLDAVIDYLPAPTEVVDIKGIDPKTEEEVFVKSSDDGEFAGLAFKIMTDPFVGQLTFVRVYRGKLESGSYVYNSTKDKKERVGRLLKMHSNKREDIKEVYAGEICAFVGLKDTLTGDTLCDEKNAVVLERMEFPEPVIHIAVEPKTKADQEKMGVALGKLAEEDPSFRVMTQEETGQTLIGGMGELHLEIIVDRLKREFKVEAEIGQPQVAFRETIRSSVSKEHKYAKQSGGRGQYGHVFIKLEPKEPGSGYEFVNEISGGVIPKEYIPAVDKGIQEAMQNGVLAGYPVVDFKVTLYDGSYHDVDSSEMAFKIAGSMAFKEASRAANPVLLEPMMKVEVEVPEEYMGDVIGDLNRRRGQINSMDDRLGLKIVNAFVPLVEMFGYSTDLRSATQGRGTYSMEFDHYGEVPSNIAKEIVEKRKG

SEQ ID NO: 11569 - protein, 155 aa, Helicobacter pylori; identical to SEQ ID NO: 11408

SEQ ID NO: 11570 - protein, 135 aa, Helicobacter pylori; identical to SEQ ID NO: 11409

SEQ ID NO: 11571 - protein, 2890 aa, Helicobacter pylori
MSKKIPLKNRLRADFTKTPTDLEVPNLLLLQRDSYDSFLYSKDGKESGIEKVFKSIFPIQDEHNRITLEYAGCEFGKSKYTVREAMERGITYSIPLKIKVRLILWEKDTKSGEKNGIKDIKEQSIFIREIPLMTERTSFIINGVERVVVNQLYRSPGVIFKEEESSTSSNKLIYTGQIIPDRGSWLYFEYDSKDVLYARINKRRKVPVTILFRAMDYQKQDIIKMFYPLVKVRYENDKYLIPFASLDANQRMEFDLKDPQGKIILLAGKKLTSRKIKELKENHLEWVEYPMDILLNRHLAEPVMVGKEVLLDMLTQLDKNRLEKIHDLGVQEFVIINDLALGHDASIIHSFSADHESLKLLKQTEKIDDENALAAIRIHKVMKPGDPVTTEVAKQFVKKLFFDPERYDLTMVGRMKMNHKLGLHVPDYITTLTHEDIITTVKYLMKIKNNQGKIDDRDHLGNRRIRAVGELLANELHSGLVKMQKTIKDKLTTMSGAFDSLMPHDLVNSKMITSTIMEFFMGGQLSQFMDQTNPLSEVTHKRRLSALGEGGLVKDRVGFEARDVHPTYYGQFGPIETPEGQNIGLINTLSTFTRVNDLGFIEAPYKKVVDGKVAGETIYLTAIQEDSHIIAPASTPIDEEGNILGDLIETRVEGEIVLNEKSKVTLMDLSSSMLVGVAASLIPFLEHDDANRALMGTNMQRQAVPLLRSDAPIVGTGIEKIIARDSWGAIKANRAGVVEKIDSKNIYILGEGKEEAYIDAYSLQKNLRTNQNTSFNQVPIVKVGDKVEAGQIIADGPSMDRGELALGKNVRVAFMPWNGYNFEDAIVVSERITKDDVFTSTHIYEKEVDARELKHGVEEFTADIPDVKEEALAHLDESGIVKVGTYVSAGMILVGKTSPKGEIKSTPEERLLRAIFGDKAGHVVNKSLYCPPSLEGTVIDVKVFTKKGYEKDARVLSAYEEEKAKLDMEHFDRLTMLNREELLRVSSLLSQAILEEPFSHNGKDYKEGDQIPKEEIASINRFTLASLVKKYSKEVQNHYEITKNNFLEQKKVLGEEHEEKLSILEKDDILPNGVIKKVKLYIATKRKLKVGDKMAGRHGNKGIVSNIVPVADMPYTADGEPVDIVLNPLGVPSRMNIGQILEMHLGLVGKEFGKQIASMLEDKTKDFAKELRAKMLEIANAINEKDPLTIHVLENCSDEELLEYAKDWSKGVKMAIPVFEGISQEKFYKLFELAKIAMDGKMDLYDGRTGEKMRERVNVGYMYMIKLHHLVDEKVHARSTGPYSLVTHQPVGGKALFGGQRFGEMEVWALEAYGAAHTLKEMLTIKSDDIRGRENAYRAIAKGEQVGESEIPETFYVLTKELQSLALDINIFGDDVDEDGAPRPIMIKEDDRPKDFSSFQLTLASPEKIHSWSYGEVKKPETINYRTLKPERDGLFCMKIFGPTKDYECLCGKYKKPRFKDIGTCEKCGVAITHSKVRRFRMGHIELATPVAHIWYVNSLPSRIGTLLGVKMKDLERVLYYEAYIVKEPGEAAYDNEGTKLVMKYDILNEEQYQNISRRYEDRGFVAQMGGEAIKDLLEEIDLITLLQSLKEEVKDTNSDAKKKKLIKRLKVVESFLNSGNRPEWMMLTVLPVLPPDLRPLVALDGGKFAVSDVNELYRRVINRNQRLKRLMELGAPEIIVRNEKRMLQEAVDVLFDNGRSTNAVKGANKRPLKSLSEIIKGKQGRFRQNLLGKRVDFSGRSVIVVGPNLKMDECGLPKNMALELFKPHLLSKLEERGYATTLKQAKRMIEQKSNEVWECLQEITEGYPVLLNRAPTLHKQSIQAFHPKLIDGKAIQLHPLVCSAFNADFDGDQMAVHVPLSQEAIAECKVLMLSSMNILLPASGKAVAIPSQDMVLGLYYLSLEKSGVKGEHKLFSSVNEIITAIDTKELDIHAKIRVLDQGNIIATSAGRMIIKSILPDFIPTDLWNRPMKKKDIGVLVDYVHKVGGIGITATFLDHLKTLGFRYATKAGISISMEDIITPKDKQKMVEKAKVEVKKIQQQYDQGLLTDQERYNKIIDTWTEVNDRMSKEMMSAIAKDKEGFNSIYMMADSGARGSAAQIRQLSAMRGLMTKPDGSIIETPIISNFKEGLNVLEYFNSTHGARKGLADTALKTANAGYLTRKLIDVSQNVKVVSDDCGTHEGIEITDIAVGSELIEPLEERIFGRVLLEDVIDPITNEILLYADTLIDEEGAKKVVEAGIKSITIRTPVTCKAPKGVCAKCYGLNLGEGKMSYPGEAVGVVAAQSIGEPGTQLTLRTFHVGGTASRSQDEREIVASKEGFVRFYNLRTYTNKEGKNIIANRRNASILVVEPKIKAPFDGELRIETVYEEVVVSVKNGDQEAKFVLRRSDIVKPSELAGVGGKIEGKVYLPYASGHKVHKGGSIADIIQEGWNVPNRIPYASELLVKDNDPIAQDVYAKEKGVIKYYVLEANHLERTHGVKKGDIVSEKGLFAVVADDNGREAARHYIARGSEILIDDNSEVSANSVISKPTTNTFKTIATWDPYNTPIIADFKGKVNFVDVIAGVTVAEKEDENTGITSLVVNDYIPSGYKPSLFLEGANGEEMRYFLEPKTSIAISDGSSVEQAEVLAKIPKATVKSRDITGGLPRVSELFEARKPKPKDVAILSEVDGIVSFGKPIRNKEHIIVTSKDGRLTDYFVDKGKQILVHADEFVHAGEAMTDGVVSSHDILRISGEKELYKYIVSEVQQVYRRQGVSIADKHIEIIVSQMLRQVRILDSGDSKFIEGDLVSKKLFKEENTRVIALKGEPAIAEPVLLGITRAAIGSDSIISAASFQETTKVLTEASIAMKKDFLEDLKENVVLGRMIPVGTGMYKNKKIVLRALEDNSKF

SEQ ID NO: 11572 - protein, 125 aa, Helicobacter pylori
MAISKEEVLEYIGSLSVLELSELVKMFEEKFGVSATPTVVAGAAVAGGAAAESEEKTEFNVILADSGAEKIKVIKVVREITGLGLKEAKDATEKTPHVLKEGVNKEEAETIKKKLEEVGAKVEVK

SEQ ID NO: 11573 - protein, 164 aa, Helicobacter pylori
MQKQHQRQHKVELVANLKSQFDSAKALLICDYKGLSVKKLEALRNKARIQGIKVQVIKNTLAHIAMKEVGCADLDLKETNVFLWGDDQIALSKLVFDFQKEHKDHFVLKAGLFDKESVSVAHVEAVSKLPSKEELMGMLLSVWTAPARYFVTGLDNLRKAKEEN

SEQ ID NO: 11574 - protein, 141 aa, Helicobacter pylori; identical to SEQ ID NO: 11413

SEQ ID NO: 11575 - protein, 171 aa, Helicobacter pylori
MLDLSYSLERVLQEDPAARNKWEVLLLYPGIHALLCYRLAHALHKRRFYFIARALSQLARFITGIEIHPGAKIGRGLFIDHGMGVVIGETTEIGDDVTIYHGVTLGGTGKFKGKRHPTLGNRVVVGAGAKVLGAICVGDDVRIGANAVVLSDLPTGSTAVGAKAKTITKDR

SEQ ID NO: 11576 - protein, 688 aa, Helicobacter pylori
MDFITINSGNRTEEFALKQVAKQATSSLMYRLGKTLILASVCVEREPVSEDFLPLVVQFLEKSYAAGKIPGGFVKREGRAQDFEILTSRLIDRTLRPLFPKDYRYPTQITLMVLNHDIENDLQVSALNAASATLFLAHIAPIKSVSACRIARVDNEFIINPSASLLNQSSLDLFVSGTKESLNMIEMRSLGQKLNALEEPLMLEALELAQKSLKETCALYEEAFTPYQNELLFKEGEGIVLNERLLDLLKNQYFDEIIKGIESSALSERENVFKEVAKKISEAHSEFSLEEIELSLEKVKKTEIRRMIIQDKIRPDKRALEEVRPISIESNLLPMAHSSILFTRGQTQSLVVGVLGMDNDAQTHENLEHKAPIKERFMFHYNFPPFCVGEASSIGATSRRELGHGNLAKRALETSIKNKEQVIRLVSEILESNGSSSMASVCAGSLALYASGVEIHDLVAGVAMGMVSERQDHAILSDISGLEDAEGDMDFKIAGNLEGITAMQMDTKMSGIQLEVLYQALLQAKRARKHILKIMHEAKEKIVINFSHLPQTEIFNVAPDKIIEIIGQGGRVIKEIVEKFEVKIDLNTPSGEVKIMGNKERVLKTKEFILNYLHSLDQELEQYAIDEVLEAQVKRIVDFGAFLSLPKGGEGLLRKQNMDKCQVILKEGDSIRCRVISFNKGKIALDLA

SEQ ID NO: 11577 - protein, 847 aa, Helicobacter pylori
MDIRNEFLQFFQNKGHEIYPSMPLVPNDATLLFTNAGMVQFKDIFTGIVPRPSIPRAASSQLCMRAGGKHNDLENVGYTARHHTLFEMLGNFSFGDYFKEEAILFAWEFVTKNLGFKPKDLYISVHEKDDEAVKLWEKFVPVDRIKKMGDKDNFWQMGDSGPCGPCSEIYIDQGEKHFKGSEDYFGGEGDRFLEIWNLVFMQYERSNDGVLSPLPKPSIDTGMGLERVQALLEHKLNNFDSSLFAPLMEEISELTGLDYASEFQPSFRVVADHARAVAFLLAQEVHFNKEGRGYVLRRILRRALRHGYLMGLKEAFLYKVVGVVCEQFSNVHAYLKESKEMVMKECFEEEERFLETLESGMELFNLSLTHLNENKIFDGKIAFKLYDTFGFPLDLTNDMLRSHGACVDMQGFENCMQEQVKRSKASWKGKQNNADFSAILNAYAPNEFVGYETTECLANALGFFDSDFKEITEANPNQEVWVLLEKTPFYAEGGGAIGDRGTLFKDNEEAALVLDTKNFFGLNFSLLEIKKALKKGDQVIAQVSDERLEIAKHHSATHLLQSALREVLGSHVSQAGSLVESKRLRFDFSHAKALNDEELEKVEDLVNAQIFKHLTSQVEHMPLNQAKDKGALALFSEKYAENVRVVSFKEASIELCGGIHVENTGLIGGFRIVKESGVSSGVRRIEAVCGKAFYQLTKEENKELKNAKTLLKNNDVIAGINKLKESVKNSQKAPVSMDLPVEKIHGVNLVVGVVEQGDIKEMIDRLKSKHEKLLAIVFKKENERITLACGVKNVPIKANAWANEVAQILGGKGGGRDDFASAGGKDIENLQAALNLAKNTALKALEG

SEQ ID NO: 11578 - protein, 85 aa, Helicobacter pylori; identical to SEQ ID NO: 11420

SEQ ID NO: 11579 - protein, 181 aa, Helicobacter pylori
MFNKVIMVGRLTRNVELKYLPSGSAAATIGLATSRRFKKQDGTLGEEVCFIDARLFGRTAEIANQYLSKGSSVLIEGRLTYESWMDQTGKKNSRHTITADSLQFMDKKSDNPQANSMQDSMTHENFNNAYPTNYNAPSQDPFSQAQSYPQNAYTKENSQAQPSKYQNSVPEINIDEEEIPF

SEQ ID NO: 11580 - protein, 266 aa, Helicobacter pylori
MKLKSFGVFGNPIKHSKSPLIHNACFLTFQKELGFLGHYHPILLPLESRIKNEFLHLGLSGANVTLPFKERAFQICDKIKGIALECASVNTLVLENDELVGYNTDALGFYLSLKHQNYQNDQNALILGAGGSAKALACGLQKQGLKVSVLNRSARGLDFFQRLGCDCFMEPPKSAFDLIINATSASLHNELPLNKEVLKGYFKESKLAYDLAYGFLTPFLSLAKELKIPFQDGKDMLIYQASLSFEKFSDSQIPYSKAFEVMRSVF

SEQ ID NO: 11581 - protein, 335 aa, Helicobacter pylori
MKDILNALYHQKDLNDEEVKKLFTLIIDEKVSPAQLGAVLCALKIKGESFKEISVAATTLLEHAPKPFNSGLDLIDNCGTGGDGLKTINISTIAALIASSMGLSMAKHGSRSVSSHSGSADLLENLGVNIEMNPMQLENCFKQSHFGFLFAPLYHQSFKKSAPLRKELFTKTIFNCLGPLINPLRPKIQLLGVYDKSLCKTMALALKALGVKRAMVVNGGGTDEIVLHDITHACELKNNEILEYDLSAKDFDLPPYDLKELQIENAKESVQACLDILENKGKDSHTMVVAANVASLLYLSHRAKDLKEGVSMTLEHLKTKAPYAHLQKIIRLSHA

SEQ ID NO: 11582 - protein, 116 aa, Helicobacter pylori
MRHKHGYRKLGRTSSHRKALLKNLAIALIEHNKIETGIYKAKELRSYIEKLTTVARVGDFNAHRHVFAYLQNKEATHKLVTEIAPKYAQRNGGYTRIQRTTFRRGDASTLATIEFV

SEQ ID NO: 11583 - protein, 344 aa, Helicobacter pylori
MKVIKTAPLIPSEIKVLEKEGNRVKISLAPFEFGYAVTLAHPIRRLLLLSSVGYAPVGLKIEGVHHEFDSLRGVTEDVSLFIMNLKNIRFIAKALVGQDSSLENQSVVVDYSFKGPMELRARDLNSDHIEIVNPEMPLATINEDAQLNFSLIIYKGMGYVPSENTRELMPEGYMPLDGSFTPIKNVVYEIENVLVEGDPNYEKIIFDIETDGQIDPYKAFLSAVKVMSKQLGVFGERPIANTEYSGDYAQRDDAKDLSAKIESMNLSARCFNCLDKIGIKYVGELVLMSEEELKGVKNMGKKSYDEIAEKLNDLGYPVGTELSPEQRESLKKRLEKLEDKGGND

SEQ ID NO: 11584 - protein, 72 aa, Helicobacter pylori; identical to SEQ ID NO: 11429

SEQ ID NO: 11585 - protein, 420 aa, Helicobacter pylori
MNKAIASKILITLGFLFLYRVLAYIPIPGVDLAAIKAFFDSNSNNALGLFNMFSGNAVSRLSIISLGIMPYITSSIIMELLSATFPNLAKMKKERDGMQKYMQIVRYLTILITLIQAVSVSVGLRSISGGANGAIMIDMQVFMIVSAFSMLTGTMLLMWIGEQITQRGVGNGISLIIFAGIVSGIPSAISGTFNLVNTGVINILMLIGIVLIVLATIFAIIYVELAERRIPISYARKVVMQNQNKRIMNYIPIKLNLSGVIPPIFASALLVFPSTILQQATSNKTLQAIADFLSPQGYAYNILMFLLIIFFAYFYSSIVFNSKDIADNLRRNGGYIPGLRPGEGTSSFLNAVASKLTLWGSLYLALISTVPWILVKAMGVPFYFGGTAVLIVVQVAIDTMKKIEAQIYMSKYKTLSAVGF

SEQ ID NO: 11586 - protein, 153 aa, Helicobacter pylori; identical to SEQ ID NO: 11432

SEQ ID NO: 11587 - protein, 178 aa, Helicobacter pylori
MSRIGKRIIEIPSSVQASVEGSKLLFKNNKEKHELETHNRVKITLENNQLSFQPVGEDAQFRAYWGTYGALANNIVIGLSAGFSKTLEVNGVGYKVALGHKTLDLSLGFSHPVKYPIPAGIEMVVEKNTITIKGSDKQQVGQVAAEIRSFRPPEPYKGKGVKYSNEVIIRKAGKTAKK

SEQ ID NO: 11588 - protein, 131 aa, Helicobacter pylori; identical to SEQ ID NO: 11435

SEQ ID NO: 11589 - protein, 181 aa, Helicobacter pylori
MFGLKQFYQNEVRAKLAQELDIKNPMLLPKLEKIVISVGAGAHAKDMKIMQNIAQTISLVAGQKAVITKAKKSVAGFKIREGMAVGAKVTLRNKRMYNFLEKLIVISLPRVKDFRGISRNGFDGRGNYTFGINEQLIFPEVVYDDIMVSHGMNITMVTSTDNDKEAFKLLELLGLPFAKVR

SEQ ID NO: 11590 - protein, 86 aa, Helicobacter pylori; identical to SEQ ID NO: 11437

SEQ ID NO: 11591 - protein, 66 aa, Helicobacter pylori
MKYTELKDKSIKELEELLHAKKAELFELRVKLKNMQLSNPNEIKKARRNIARINTAINAYYSSSVE

SEQ ID NO: 11592 - protein, 234 aa, Helicobacter pylori
MGQKVNPVGLRLGINRNWTSRWFPSTRTAPSNIDEDNKIRKFLKKELYYAGVSEIVIERAAKKLRVTVVAARPGLIIGKKGVDIEKVKEGLKTLIKKEVSINIKEVKRPQADAQLAAENVATQLEKRVAFRRAMKKVMQAALKSGAKGIKVRVSGRLAGAEIARTEWYMEGRVPLHTLRAKIDYGFAEAMTVYGIIGVKVWIFKGEVLQKGIQFEKKEEAKEEREPRRSRRGRQ

SEQ ID NO: 11593 - protein, 122 aa, Helicobacter pylori
MSKALLKFVRLSPTKARLIARQIQGMNAELAIASLEFTPNKAARVLSKVVASAVANGSLDAKSALIVSCRVDAGPVLRRSIPRAKGRATAIRKPTSHVFVEVAEGKEMKSSKSHKKNQAEGK

SEQ ID NO: 11594 - protein, 93 aa, Helicobacter pylori
MSRSIKKGPFIDDHLMKKTLKAKEGKDNRPIKTWSRRSTILPEMIGFTYNVHNGRVFVPVYITENHVGYKLGEFAPTRTFKGHKGSVQKKIGK

SEQ ID NO: 11595 - protein, 215 aa, Helicobacter pylori
MSKAIVLDSHLKEKGSVELPKRYEGINSHNLYLYVKHYLSSARANTAKSKNRAEVSGGGRKPWAQKGGGRARAGSITSPVFVGGGVSHGATNKRNYNLKINKKQKRLALEYALEEKAQANKLFVVEKIAIKGVVEDNKRKHLTKEANQMFQALEQRDTLFVCLNMDEYTELAFSNLKKCLVIDVSELNAYLLAAFSSVVMEEAAFQHVVQDKTEE

SEQ ID NO: 11596 - protein, 191 aa, Helicobacter pylori
MEFLVQKIGMSRTIDANSTPVTLLKVLQAKVCQLENGKALVAYAMHKKYNKAIEGQQKKYQLSKEFNHFATLKASQQKELGDLDLSALETLKRVKASFKTKGRGFAGVMKRWNFQGGPAAHGSRFHRRPGSIGNREWPGRVQKGRKMAGHYGNELVTCQNEVLSFDKESMVLVLKGSVAGFSGAYGRIRAV

SEQ ID NO: 11597 - protein, 104 aa, Helicobacter pylori; identical to SEQ ID NO: 11443

SEQ ID NO: 11598 - protein, 360 aa, Helicobacter pylori
MNGFCARLRAITFNERLKMKIAVLLSGGVDSSYSAYSLKEQGHELVGIYLKLHASEKKHDLYIKNAQKACEFLGIPLEVLDFQKDFKSAVYDEFINAYEEGQTPNPCALCNPLMKFGLALDHALKLGCEKIATGHYARVKEIDKVSYIQEALDKTKDQSYFLYALEHEVIAKLVFPLGDLLKKDIKPLALNAMPFLGTLETYKESQEICFVEKSYIDTLKKHVEVEKEGVVKNLQGEVIGTHKGYMQYTIGKRKGFSVKGALEPHFVVGIDAKKNELIVGKKEDLATHSLKAKNKSLTKDFKDGEYFIKARYRSVPTKAFVSLKDGMIEVEFKEPFYGVAKGQALVVYKDDILLGGGVIV

SEQ ID NO: 11599 - protein, 402 aa, Helicobacter pylori
MLAKMSFMQNVKNIQEVDVNHKRVLIRVDFNVPLDENLNITDDTRIRESLPTIQFCIDNKAKDIILVSHLGRPKGVEEKLSLKPFLKRLERLLNHEVVFSQNIAQLKQALNENAPTRIFLLENIRFLKGEEENDENLAKDLASLCDVFVNDAFGTSHRKHASTYGTAKFAPIKVSGFLLKKEIDSFYQAFNHPLRPLLLIVGGAKVSSKLTLLKNILDLIDKLIIAGAMSNTFLKALGYDVQDSSVEDALINDALELLQSAKEKKVKVYLPIDAVTTDDILNPKHIKISPVQDIEPKHKIADIGPASLKLFSEVIESAPTILWNGPLGVHEKQEFARGTTFLAHKIANTYAFSLIGGGDTIDAINRAGEKDNMSFISTGGGASLELLEGKILPCFEVLDKRH

SEQ ID NO: 11600 - protein, 330 aa, Helicobacter pylori
MPIKIAINGTGRIGLCAIRVASQRKDVEIVAINSTAELETLLHLIRHDSVHGHFEAKLNANRTLNIGHSKNILVLSERDINKLDFSVANAEIIIECTGKFNSLEASSAHLKNSVKKVIISAPAQNAPTFVYGVNHTNYHNESVISNASCTTNATAPLLKILDEAFKVENALLTTIHSYTNDQNLLDTKHKDIRRARAASLNLIPTSTGVSKAISLVLPHLGPKITGLAIRVPTPNVSLVDLSLNFKKVVSKASVQHALKDASKHAFKGIVSVDEERLVSSDFISSPFSAIVIDDQIMTIGEKNAKVLAWYDNEMGYSERLIDMAQYIAQN

SEQ ID NO: 11601 - protein, 159 aa, Helicobacter pylori
MEQSHQNLQSQFFIEHILQILPHRYPMLLVDRIIELQANQKIVAYKNITFNEDVFNGHFPNKPIFPGVLIVEGMAQTGGFLAFTSLWGFDPEIAKTKIVYFMTIDKVKFRIPVTPGDRLEYHLEVLKHKGMIWQVGGTAQVDGKVVAEAELKAMIAERE

SEQ ID NO: 11602 - protein, 282 aa, Helicobacter pylori
MQEIFLCSISNVRSGDCKEDCAYCTQSSHHQGAIKRYKFKDEKVVLQEARALRELGALGFCLVTSGRELDDEKCEYIAKLAKAINKEELGLHLIACCGRADLEQLEFLRDAGIHSYNHNLETSQNFFPKICTTHTWEERFITCENALRAGLGLCSGGIFGLNESWEDRIEMLRALASLSPHTTPINFFIKNPVLPIDAETLSADEALECVLLAKEFLPNARLMVAGGREVVFKDNDKQEAKLFEYGINAVVLGDYLTTKGKAPKKDIEKLLSYGLTMATSCH

SEQ ID NO: 11603 - protein, 259 aa, Helicobacter pylori
MLETTIDFSRYSSVKIGAPLKVSVLENDNEISQEHQIIGLANNLLIAPDVKNLALLGKNYDYICDKGEWVEVGGAANASKIFNYFRANDLEGLEFLGQLPGTLGALVKMNAGMKEFEIKNVLESACVNGEWLEKEALGLDYRSSGFNGVVLRARFKKTHGFREGVLKACKSMRKSHPKLPNFGSCFKNPPNDYAGRLLEGVGLRGYCLKRVGFAKEHANFLVNLGGAEFEEALDLIELAKTRVLQEYGIHLEEEVKILR

SEQ ID NO: 11604 - protein, 920 aa, Helicobacter pylori
MKEYKDTLNLNETTFSMKGNLSVNEPKTYAKWQEQQAFKRMQNRKDNHGDFTLHDGPPYANGHLHLGHALNKILKDIVIKREYFKGKKIYYTPGWDCHGLPIEQQILEQLEKEKTSLENPTLFREKCRDHAKKFLEIQKNEFLQLGVLGDFEDPYKTMDFKFEASIYRALVGVAKKGLLKERHKPIYWSYACESALAEAEVEYKMKKSPSIFVAFDLKKEGLEKLKVKKASLVIWTTTPWTLYANVAIALKKDAVYALTQKGYLVAKALHEKLAALGVVDNAITHEFNSNDLEYLVATNPLNQRDSLVVLGDHVSLEDGTGAVHTAPGHGEEDYYLGLKYHLEVLMSVDEKGCYDEGIIHNQLLDKSYLGEHIFKAQKRIIEQLGDSLLLEREIEHSYPHCWRTHKPVIYRATTQWFILMDEPFIQNDGSQKTLREVALDAIEKVEFVPSSGKNRLKTMIENRPDWCLSRQRKWGVPLAFFIDKRTNKPCFESEVLEHVANLFEEKGCDVWWEYNIKDLLPPSYQDNAKHYEKVMHILDVWFDSGSTFKAVLEDYHGEKGQSPSDVVLEGSDQHRGWFQSSLLIGCVLNNQAPFKKVITHGFIVDEKGEKMSKSKGNVVSLDNLLKKHGSDVVRLWVAFNDYQNDLRVSQTFFIQTEQHYKKFRNTLKFLLANFSDMDLKNLERPHDFSPLDHFILEALETISAGVNSAFEEHDLVKGLNILMAFVTNELSGIYLDACKDSLYCDSKNNEKRQAIQMVLLAVASQLCYFLAPILTHTIEEVLEHSQVLRAFLQAKDVFDLKGISVLEKLHLKEFKKPENFEAVLALRSAFNEELDRLKKEGVVKNSLECAIEVKEKALCENLVEELLMVSFVGVAKEKLSETPAFTLFKAPFYKCPRCWRFKSELENTPCKRCEEVLKER

SEQ ID NO: 11605 - protein, 44 aa, Helicobacter pylori; identical to SEQ ID NO: 11449

SEQ ID NO: 11606 - protein, 461 aa, Helicobacter pylori
MKNTSSSTTLTMNDTIAAIATPLGKGAISIIKISGHNALNILKQLTQKQDFTPRYAYVCDIFSDGVLLDKALVIYFKAPYSFTGEDVCEIQCHGSPLLAQNILQACLNLGARLAKAGEFSKKAFLNHKMDLSEIEASVQLILCEDESVLNALARQLKGELKIFIEEARNNLLKLLASSEVLIDYSEEDIPSDFLKEVSFNLEKQIASFKDLLDFSNAQKQRNKGHALSIVGKPNAGKSSLLNAMLLEERALVSDIKGTTRDTIEEVIELKGHKVRLIDTAGIRESADEIERLGIEKSLKSLENCDIILGVFDLSKPLEKEDFNLMDTLNRTKKPCIVVLNKNDLAPKLELEILKSYLKIPYSILETNTLNSKACLKDLSQKISEFFPKLDTQNKLLLTSLAQTTALENAITELQNAKSHLDTLELFSYHILSAIENLNLLTRPYETSQMLDSMFSEFCLGK

SEQ ID NO: 11607 - protein, 262 aa, Helicobacter pylori
MEGFSLRINQFLAHYTKHSRREAEKLVLEGRVKINHEHAKLASVVKENDKVFLDKRLIKPLKNKKFSVLVYHKPKGELVSKADPLKRHVIYESLEKKYAHFAPVGRLDFASEGVLLLSDSKAVVSALMHANLEKEYLVKIQGFVTREMENAMQEGLKLENATKGAHQKTPIKSMEFAPFIGYEIIKNHAKYSKLRVIINEGKNRELRRFFAFFNAGVLDLRRVRYGFVNLNALPVGKARFLNRQEYNELHAFMANRANVKGD

SEQ ID NO: 11608 - protein, 1211 aa, Helicobacter pylori
MKENKAFTHLHLHTEYSLLDGANKIKILAKRIKELGMKSVSVTDHGNMFGAIDFYTSMKKEGIKPIIGMEAYIHNDDNLSSKETKQRFHLCLFAKNQEGYENLMFLSSMAYLEGFYYFPRINKKLLREHSKGIIASSACLQGEVNYHLNTNNERNRKYGAKGYDEAKRIACEYQEIFEDDFYLEIMRHGILDQRFIDEQVIKMSLETGLKIIATNDTHYTMPNDAKAQEVAMCVAMGKTLNDKGRLKHSVHEFYIKSPEEMAKLFADIPEALENTQEIADKCVLEIDLKDDKKNPPTPPSFKFTKAYAQNEGLSFEDDASYFAHKAREGLRERLILVPEEKHEQYKERLEKEIEVITNMKFPGYMLIVWDFIRYAKEMGIPVGPGRGSAAGSLVAFALKITDIDPLKYDLLFERFLNPERVSMPDIDTDFCQRRRKEIIEYMIEKYGKYNVAQVITFNKMLAKGVIRDVARVLDMPYKEADDFAKLIPNRLGITLKGYEKNGEFIEGAWELEPKIKELVESNEVAKQVWEYSLNLENLNRNAGVHAAALVVDSQKELWHKTPLFASEKTGGIVTQYSMKYLEPVDLIKFDFLGLKTLTVIDDALKIIKTQHNIDVDFLSLDMDDPKVYKTIQSGDTVGIFQIESGMFQGLNKRLRPSSFEDIIAIIALGRPGPMESGMVDDFVNRKHGVEPIAYAFKELEPILKPTYGTIVYQEQVMQIVQTIGGFSLGEADLIRRAMGKKDAQIMADNKAKFVEGAKNLGHDGQKAANLWDLIVKFAGYGFNKSHSAAYAMITFQTAYLKTYYKHEFMAAMLTSESNKIESVARYIDEVRALEIEVMPPHINSSMQDFSVAEFKNQKGELEKKIVFGLGAVKGVGGEPIKNIIEERAKGDYKSLEDFISRVDFSKLTKKSLEPLVKSGSLDNLGYTRKTMLANLDLICDAGRAKDKANEMMQGGNSLFGAMEGGIKEQVVLDMVDLGEHDAKTLLECEYETLGIHVSGNPLDEFKEEIKGFKNLVKSIDIEELEIGSQAYLLGKIMEVKKKIGKRSGKPYGTADILDRYGKFELMLFEKQLNALEELDINKPLVFKCKIEEQEEVARLRLFEILDLESAREVKIPKARYKDPEKQKEDVREIPPMEMLASSSCSLAIVLENDVKKEFLRQIKESALKHQGKRPLYLIIKDKDKQFKIQSDLMVNEKIKDDFKGLEWRDLA

SEQ ID NO: 11609 - protein, 897 aa, Helicobacter pylori
MEQPVIKEGTLALIDTFAYLFRSYYMSAKNKPLTNDKGFPTGLLTGLVGMVKKFYKDRKNMPFIVFALESQTKTKRAEKLGEYKQNRKDAPKEMLLQIPIALEWLQKMGFTCVEVGGFEADDVIASLATLSPYKTRIYSKDKDFNQLLSDKIALFDGKTEFLAKDCVEKYGILPSQFTDYQGIVGDSSDNYKGVKGIGSKNAKELLQRLGSLEKIYENLDLAKNLLSPKMYQALIQDKGSAFLSKELATLERGCIKEFDFLSCAFPSENPLLKIKDELKEYGFISTLRDLENSPFIVENVPILNSTPILDNTPALDNAPKKSRMIVLESAEPLSMFLEKLENPNARVFMRLVLDKDKKILALAFLLQDQGYFLPLEEALFSPFSLEFLQNAFSQMLQHACIIGHDLKPLLSFLKAKYQVPLENIRIQDTQILAFLKNPEKVGFDEVLKEYLKEDLIPHEKIKDFKTKSKAEKSELLSMELNALKRLCEYFEKGGLEEDLLTLARDIETPFVKVLMGMEFQGFKIDAPYFKRLEQEFKNELNVLERQILDLIGVDFNLNSPKQLGEVLYDKLGLPKNKSHSTDEKNLLKILDKHPSIPLILEYRELNKLFNTYTTPLLRLKDKDDKIHTTFIQTGTATGRLSSHSPNLQNIPVRSPKGLLIRKGFIASSKEYCLLGVDYSQIELRLLAHFSQDKDLMEAFLKGRDIHLETSKALFGEDLAKEKRSIAKSINFGLVYGMGSKKLSETLSIPLSEAKSYIEAYFKRFPSIKDYLNGMREEILKTSKAFTLLGRYRVFDFTGVNDYVKGNYLREGVNAIFQGSASDLLKLGMLKVSERFKNNPSVRLLLQVHDELIFEIEEKNAPELQQEIQRILNDEVYPLRVPLETSAFIAKRWNELKG

SEQ ID NO: 11610 - protein, 191 aa, Helicobacter pylori [sequence omitted]

SEQ ID NO: 11611 - protein, 246 aa, Helicobacter pylori
MKKENRLKQEKIINMFDDIASSYDQANRLMSFGLDVKWRQRACEHAFLFLENKKALRLVDVACGTGDMLVAWQKSALNCGIEFKECLGIDPSNNMLELAIKKCEELENKASFIQAQAKDLKGVENNSVDILSIAYGLRNIVERQEALKEFFRVLKTRGVLVILEFLKKDNPTWLDKISGFYTNKVLPLVGGAISKNYGAYSYLPQSIEGFLSLEGLKNELKNAGFEILRTEDSIAQISTTMLVKKS

SEQ ID NO: 11612 - protein, 533 aa, Helicobacter pylori
MEIRNIKEFEKASKKLQKDTLKIALALLFLIGAALLALIFGQANSKGLLLIFAAVIGGYMAMNIGANDVSNNVGPAVGSKAISMGGAILIAAVCEMLGAIIAGGEVVSTIKGRIVSPEFINDAHVFINVMLASLLSGALWLHVATLIGAPVSTSHSVVGGIMGAGMAAAGMSAINWHFLSGIVASWVISPLMGALIAMFFLMLIKKTIAYKEDKKSAALKVVPYLVALMSLAFSWYLIVKVLKRLYAVGFEIQLACGCVLALLIFILFKRFVLKKAPQLENSHESVNELFNVPLIFAAALLSFAHGANDVANAIGPLAAISQTLEDASSPMGSTLNSVPLWIMVVGAAGIALGLSLYGPKLIKTVGSEITELDKMQAFCIALSAVITVLLASQLGLPVSSTHIVVGAVFGVGFLRERLREQSRRRFARIRDNIVAAHFGEDLEEIEGFLERFDKANLKEKSLMLESLKKSKNTAIALELKKKEKKSLKKVYKEEVIKRSILKKIVTAWLVTVPVSALLGALLFVALGFIEKYF

SEQ ID NO: 11613 - protein, 447 aa, Helicobacter pylori
MKLKKTLTYQHHAYSFLSDNTNEVLENPKEILFVKTPLNEKYAPLIAEKNLAILDFNELKNYFDFKIKIVGITGTNGKTTTASLMYSLLLDLNKKTALLGTRGFFIDDKHIKEKGLTTPTLLELYSDLEEAIRLKCEYFIMEVSSHAIVQKRIAGLDFALKILTNITSDHLDFHQNIENYRDAKNSFFKDEGLKVINRDETNALFNPINARTYALDKKAHLNVQAFSLNPSISASLCYQHDLRDPNLKETALIHSPLLGRYNLYNILAGVLGVKLLTQLPLETIAPLLENFYGVKGRLEIVHSKPLVVVDFAHTTDGMQQVFESFKNQKITALFGAGGDRDKTKRPKMGAIASCYAHQIILTSDNPRSENEEDIIKDILKGINNSSKVIVEKDRKKAILNALENLKDDEVLLILGKGDENIQIFKDKTIFFSDQEVVKDYYLNLKQG

SEQ ID NO: 11614 - protein, 220 aa, Helicobacter pylori
MEGVLNFLTNINVIFTLLGYLIGGIPFGYALMKIFYGMDITKIGSGGIGATNVLRALQSKGVSNAKQMALLVLILDLFKGMFAVFLSKLFGLDYSLQWMVAIASILGHCYSPFLNFNGGKGVSTIMGSVVLLIPIESLIGLTVWFFVGKVLKISSLASILGVGTATVLIFFVPYMHIPDSVNILKEVGTQTPMVLIFIFTLIKHAGNIFNLLTGKEKKVL

SEQ ID NO: 11615 - protein, 395 aa, Helicobacter pylori
MEKISDLIECIAYEKNLPKEMISKVIQGCLLKMAQNELDPLARYLVVEENKQLQLIQLVEVLEDDDERLVNDPSKYISLSKAKEMDPSVKIKDELSYSLSLESMKQGAINRLFKDLQYQLEKALEDSHFEAFQKRLNSVLMGQVILVDHNQNTFIEIEQQFQGVLSMRHRIKGESFKIGDSIKAVLTQVKRTKKGLLLELSRTTPKMLEALLELEVPEIKDKEIEIIHCARIPGNRAKVSFFSHNSRIDPIGAAVGVKGVRINAISNELNKENIDCIEYSNVPEIYITLALAPAKILSVEIKKIPIEELSAEEKESIQERFIVNNHLQKAKVRLLDIEKSKAIGKGGVNVCLASMLTGYHIEFETIPSVKENAENENEKETPKVGVEALESLFKN

SEQ ID NO: 11616 - protein, 457 aa, Helicobacter pylori
MDTNNNIEKEILALVKQNPKVSLIEYENYLSQLKYNPNASKSDIAFFYAPNKFLCTTITAKYGALLKEILSQNKVGMHLAHSVDVRIEVAPKIQVNAQSNINYKATKTSVKDSYTFENFVVGSCNNTVYEIAKKVAQSDTPPYNPVLFYGGTGLGKTHILNAIGNHALEKHKKVVLVTSEDFLTDFLKHLDNKNMDSFKKKYRHCDFFLLDDAQFLQGKPKLEEEFFHTFNELHANSKQIVLISDRSPKNIAGLEDRLKSRFEWGITAKVMPPDLETKLSIVKQKCQLNKITLPEEVMEYIAQHISDNIRQMEGAIIKISVNANLMNATIDLNLAKTVLEDLQKDHAEGSSLENILLAVAQSLNLKSSEIKVSSRQKNVALARKLVVYFARLYTPNPTLSLAQFLDLKDHSSISKMYSSVKKMLEEEKSPFILSLREEIKNRLNELNDKKTAFNSSE

SEQ ID NO: 11617 - protein, 597 aa, Helicobacter pylori
MCGIVGYIGDSEKKSILLEGLKELEYRGYDSAGLAVLSANRLEVFKTQGKLENLRTELKNKEFLNFGVSIAHTRWATHGKPSSANAHPHFTENLALVHNGIIENYASLKKELENKGHAFLSQTDTEVIAHLLEETLKSEGDLLKAFEKSISLLKGSYAILMLHKRAKESLFYAKSSSPLIVGKGKEGVFFASSLSVLAPKVDQFVILEENSVGQISLENFKDLNNIENMKDYAFENKDYSKGNFRNYLEKEIYEQHSSLLECLEGRLEALSVYCEIDPEFLENVSEITLCSCGSSYHASLASVYLFERLAKIRARAILASEYRYAHFKSNPNELFIAISQSGETADTLEALKLAKAQGLKTISLCNAPFSMMSRISDHTLLIRAGVERSVASTKAFSSQVMLLWLLSVYLGKQLGTISKEEERIQAKNMLNSVKAMKVEPKLHEKIKRLSKRYLHGHGFFYIGRDVFYPLALEGALKLKEISYLHAEGYASAEMKHGPIALVDSNLFTIALLSKHLLFDKTKSNIEELSARDSTICVLSSEILEIADDFIQLEESESYMEEFFRMNLAMQLLALEIAMRLNHDVDHPRNLAKSVTVE

SEQ ID NO: 11618 - protein, 380 aa, Helicobacter pylori
MTIGLVKESMDLESRVALVPDDVALIAQKGVEVLVQNSAGANSGYSNEAYESVGAKIVDSKTAWGQDLVVKCKEPLEHEYPLLKEKATLFSYLDLAYQKSLCEMFINKKITSICTETIAGPKNDYPILAPMSVVAGRLAAHLVQHYLLALEHVKGFMGKGVMLGGLSGAQRAKIVVIGGGVVGMESAKVLSQMGAKVTILELDYAKLQNHPYYHLYDLEVLSVNEANIIQALNGAVGLVGAVLVTASQTPKVILRRHLKYMQKQGVVIDVACDLGGCIETIRQTSHSNPVYVEEDLLHYGVPNMPGIVAKTSSTAYSHASVPYLLYYLEHGLKGFLTANTKIVANTLGGLSAYNGYITQEGIAKAFNLAFKSPLEILKEL

SEQ ID NO: 11619 - protein, 365 aa, Helicobacter pylori
MHNACNCNSQRVPFKGFAIDGKDGKFHEWEHSRHAMGEYDVVIDTHFSGICHTDIHFAHSDWLPGIYPMVPGHEIAGVVSAVGSKVTKFKVGDHAGVGCMVNSCGECHTCKHEHQEQWCENNKTIYTYSWEDSFHNNEPTYGGYSNNIVVSENFVISIPKEAPLDKAAPLLCAGITVYSPLKFSKVTKGSKVGIAGFGGLGHMALKYAVAMGAQVSVFARNDKKKQMAQKLGATNFYTSVGECKEKFDLIVSSIPTQYDLLAYTKLLKYGGEVAIVGIPPKDPQRNLDFGDLVLFSGNHKVYGSWIGGVKETQEMMDFSVKHGIYPEIELVTGQEIDATWDKLLNGQGNFRYVIDMKKSMENFKK

SEQ ID NO: 11620 - protein, 355 aa, Helicobacter pylori
MSGISAQLVKKLRDLTDAGMMDCKKALVEVAGDLQKAIDFLREKGLSKAAKKADRIAAEGVVALEVAPDFKSAMMVEINSETDFVAKNEGFKELVKKTLETIKTHNIHTTEELLKSPLDNKPFEEYLHSQIAVIGENILVRKIAHLKAPSSHIINGYAHSNARVGVLIAIEYNNEKNAPKVVELARNIAMHAAAMKPQVLDCKDFSLDFVKKETLALIAEIEKDNEEAKRLGKPLKNIPTFGSRIELSDEVLAHQKKAFEDELKEQGKPEKIWDKIVPGKMERFIADNTLIDQRLTLLGQFYVMDDKKTIAQVIADCSKEWDDNLKITEYVRFELGEGIEKKTENFAEEVALQMK

SEQ ID NO: 11621 - protein, 264 aa, Helicobacter pylori
MVTMKDLLECGVHFGHQTRRWNPKTKKFIFGVRKNIHIIDLQKTLRYFRYTYNIVRDASAQGKSIMFVGTKKQANETLKEFAESIQVPYVNYRWLGGMLTNFSTIRKSVRKLEIIEEMENSGQIDLLTKKEKLMILRKKEKLDKYLGGVRHMKKIPDMIFVIDVAKEKIAVAEARKLHIPIVAPLDTNCDPDLVDYPIPGNDDAIRSIRLFCKEMSEAILEGRELMQEEIVHADENSEEIEFVSNEEKEEMLAEIQKEITQGAE

SEQ ID NO: 11622 - protein, 806 aa, Helicobacter pylori
MDFINIEKKWQEFWWKNKSFEPKDDFNLPKKYILSMLPYPSGEIHMGHVRNYTIGDALARYYRLHHYNVLHPMGFDSFGMPAENAAIKHGIHPKTWTYENIEAMQKEFEALGFSFSKNREFATSDPDYTKFEQQFFIDLWEKGLIYRKKAMLNWCPNDKTVLANEQVIDGRCWRCDTEVIQKELYQYYLKITNYAEELLKDLETLENHWPSQVLTMQKNWIGKSSGLQFGFKIADECLKACNNIQEIEVFTTRADTIYGVTYIAIAPEHPLVEHAIKRVSQEDSKMIKAILNTTQRERALEKKGAFLGIYAIHPLTKQKIPVWVANFALANYGSGALMGVPACDERDFEFANLYHIPIKVITQSPQNLPHTKEEILKNSGEWSDLSSSVAREKIIAYFEKENLGKRVINYRLQDWGVSRQRYWGAPIPMIHCKHCGIVPETQLPVTLPEDIVIDGEGNPLEKHASWKFAQCPKCHKDALRETDTMDTFIQSSWYFLRYTTPKNQRENQAFDQNYLKYFMPVDTYIGGIEHAILHLLYARFFTKALRDLGYLHLDEPFKQLITQGMVLKDGAKMSKSKGNVVSPKEILKKYGADAVRLFILFAAPPAKELEWNDNALEGAHRFIKRLYDKANAITPTTSKPEFKEVGLNEAQKLARKKVYEALKKSHEIFNKAESAYAFNTLIASCMEALNALNAQSDEQILCEGYFVLLQILEPMIPHTAWELSERLFKRENFKPIEVDESALIEDFMTLGLTINGKRRAELKVNINASKEEIIILAKKELEKYLENASVKKEIYVPNKLVNFVTA

SEQ ID NO: 11623 - protein, 388 aa, Helicobacter pylori
MTTDRNLFFCASLLIFLGVLMSYSLSTYTTVVLYHYGEFHFFIRQLVSAIMGIIIMWGLSRVDPRKWFSRLGFFLLFVPSLLIIGMFFLPESLSSSAGGAKRWIRLGFFSLAPLEFLKIGFTFFLAWSLSRTFVAKEKANVKEELITFVPYSFVFVALAIGVGVLQNDLGQIVLLGAVLAVLLVFSGGSVHLFGLIVSGAFAISVLAIVTSEHRILRLKLWWSNLQNSLFTLLPDKLANALRISDLPESYQVFHAGNAMHNGGLLGQGLGLGQIKLGFLSEVHTDMVLAGIAEEWGFLGLCVCFILFSVMIVLIFRIANRLKEPKYSLFCVGVVLLIGFSLVINAFGVGGIFPVKGLAVPFLSYGGSSLLANCIAIGLVLSLARYTKG

SEQ ID NO: 11624 - protein, 271 aa, Helicobacter pylori
MNIFKRIICVTAIVLGFFNLLDAKHHKEKKEDHKITRELKVGANPVPHAQILQSVVDDLKEKGIKLVIVSFTDYVLPNLALNDGSLDANYFQHRPYLDRFNLDRKMHLVGLANIHVEPLRFYSQKITDIKNLKKGSVIAVPNDPANQGRALILLHKQGLIALKDPSNLYATEFDIVKNPYNIKIKPLEAALLPKVLGDVDGAIITGNYALQAKLTGALFSEDKDSPYANLVASREDNAQDEAIKALIEALQSEKTRKFILDTYKGAIIPAF

SEQ ID NO: 11625 - protein, 327 aa, Helicobacter pylori
MVVELKNIEKIYENGFHALKGVNLELKKGDILGVIGYSGAGKSTLIRLINCLERPSSGEVLVNGVNLLNLKPKELQKARQKIGMIFQHFNLLSAKNVFENVAFALEIARWEKTKIKSRVHELLELVGLEDKVHFYPKQLSGGQKQRVAIARSLANCPNLLLCDEATSALDSKTTHSILTLLSGIQKKFDLSIVFITHQIEVVKELCNQMCVISSGEIVERGSVEEIFANPKHAVTKELLGIKNEHADQKSQDIYRIVFLGEHLDEPIISNLIRRFKIDVSIISGNIEELTTKDIGYLVVRFLGSVAEIQRALEYLNALGLQVEKLKD

SEQ ID NO: 11626 - protein, 340 aa, Helicobacter pylori
MILSIESSCDDSSLALTRIEDAKLIAHFKISQEKHHSSYGGVVPEIASRLHAENLPLLLERVKISLNKDFSKIKAIAITNQPGLSVTLIEGLMMAKALSLSLNLPLILEDHLRGHVYSLFINEKQTRMPLSVLLVSGGHSLILEARDYEDIKIVATSLDDSFGESFDKVSKMLDLGYPGGPIVEKLALDYAHPNEPLMFPIPLKNSPNLAFSFSGLKNAVRLEVEKNAHNLNDEVKQKIGYHFQSAAIEHLIQQTKRYFKIKRPKIFGIVGGASQNLALRKAFEDLCAEFDCELVLAPLEFCSDNAAMIGRSSLEAYQKKRFIPLEKADISPRTLLKNFE

SEQ ID NO: 11627 - protein, 100 aa, Klebsiella pneumoniae
MRHEIIKTTLPKAKELRRVVEPLITLAKTDSVANRRLAFARTRDNEIVAKLFNELGPRFASRAGGYTRILKCGFRAGDNAPMAYIELVDRAEPKAEAAAE

SEQ ID NO: 11628 - protein, 116 aa, Klebsiella pneumoniae
MGVVSQNFRPEFINRIDEVVVFHPLGEKHIASIAQIQLQRLYKRLEERGYEVQMSDEALKLLSANGYDPVYGARPLKRAIQQQIENPLAQQILSGELVPGKTIELVVKDDRIVAVQ

SEQ ID NO: 11629 - protein, 222 aa, Klebsiella pneumoniae
MNTILLVDDDRELTSLLKELLDIEGFNVLVAHDGEQALALLDDSVDLLLLDVMMPKKNGIDTLKELRQTHQTPVIMLTARGSELDRVLGLELGADDYLPKPFNDRELVARIRAILRRSHWSEQQQTTEAGSPTLEVDALSLNPGRQEANFDGQTLELTGTEFTLLYLLAQHLGQVVSREHLSQEVLGKRLTPFDRAIDMHISNLRRKLPERKDGHPWFKTLR

SEQ ID NO: 11630 - protein, 208 aa, Klebsiella pneumoniae
MFRPSAACPRAAFSAEGAGSAAPGEPRVTPMLDWHGVLSGQPLQWIISGFLTTVWVSVAGILLATLLAVLLLALRLGGGRAGRGLVAAWVSLFRNTPLLVQLLFWYFAAWNLLPLAVKEVVNDEHAWSILPGNVWWLTPEFLCSMWGLGVFTSAFLVEEIASGLRAVSHGQREAALSQGFTPWQELRFILLPQGWPTPGSRLSASILT

SEQ ID NO: 11631 - protein, 244 aa, Klebsiella pneumoniae
MTTFNDIDAVIHLAGDPIADKRWTAEQKQRLCHSRWDLTQRLVGLIHASDPPPSVLISGSAIGYYGDLGEVVVTEEEPPHNEFTHKLCARWEQIACEAQSERTRVCLLRTGVVLAPRGGILGKMTPAFKLGLGGPIGNGRQYLAWIHIDDMVNGILWLLDNDLRGPFNMVSPYPVHNEQFAHALGHALHRPAIFRVPAAAIRLLMGESAVLVLGGQRALPKRLEAAGFAFRWYDLDEALKDVLS

SEQ ID NO: 11632 - protein, 131 aa, Klebsiella pneumoniae
MRHYEIVFMVHPDQSEQVPGMIERYTGAITAAAGTIHRLEDWGRRQLAYPINKLHKAHYVLMNVEAPQEAIDELETNFRFNDAVIRSMVMRTKHAVTEASPMVKAKDERRERREDFANETADDSEAGDSEE

SEQ ID NO: 11633 - protein, 214 aa, Klebsiella pneumoniae
MRIILLGAPGAGKGTQAQFIMEKYGIPQISTGDMLRAAVKSGSELGKQAKDIMDAGKLVTDELVIALVKERIAQEDCRNGFLLDGFPRTIPQADAMKEAGITVDYVLEFDVPDELIVDRIVGRRVHAASGRVYHIKFNPPKVEGKDDVTGEELTTRKDDQEETVRKRLVEYHQMTAPLIGYYTKEAQAGNTKYAKVDGTKAVADVRAELEKILG

SEQ ID NO: 11634 - protein, 322 aa, Klebsiella pneumoniae
MGRIGRIVFRAAQKRSDIEIVAINDLLDAEYMAYMLKYDSTHGRFDGTVEVKDGHLVVNGKKIRVTAERDPANLKWDEVGVDVVAEATGIFLTDETARKHITAGAKKVVLTGPSKDNTPMFVRGANFDAYAGQDIVSNASCTTNCLAPLAKVINDNFGIVEGLMTTVHATTATQKTVDGPSHKDWRGGRGAAQNIIPSYTGAAKAVGKVLPELNGKLTGMAFRVPTPNVSVVDLTVRLEKAASYEEIKKAIKAASEGAMKGVLGYTEDDVVSTDFNGEVCTSVFDAKAGIALNDNFVKLVSWYDNETGYSNKVLDLIAHISK

SEQ ID NO: 11635 - protein, 250 aa, Klebsiella pneumoniae
MRGEIQPGDVLIEATSGNTGIALAMIAALKGYRMKLLMPDNMSQERRAAMRAYGAELILVSKEQGMEGARDLALEMAQRGEGKLLDQFNNPDNPYAHYTTTGPEIWQQTAGRITHFVSSMGTTGTITGVSRFLREQSKPVTIVGLQPEEGSSIPGIRRWPAEYMPGIFRRSLVDTVLDIHQQDAENTMRQLAVREGIFCGVSSGGAVAGALRIARENPGAVVVAIVCDRGDRYLSTGVFGEEHFSQGAGI

SEQ ID NO: 11636 - protein, 315 aa, Klebsiella pneumoniae
MPGRGNLLAQAEAFRGLSVEVKRGINPDLVEQATAQDEQYRLEDEDNLPENDAFSPDSAETVRSREVLRHAETYGKCAESDTLSEHFLEKQAGIEMVEDSQETTHFGFQTVAKEQKADMVAHVFHSVAAKYDVMNDLMSFGIHRLWKRFTIDCSGVRRGQTVLDLAGGTGDLTAKFSRLVGETGRVMLADINDSMLKMGREKLRNIGIVGNVEYVQANAEALPFADNTFDCITISFGLRNVTDKEKALRSMYRVLKPGGRLLVLEFSKPIIEPLSKAYDAYSFHILPKVGELVAKDGDTIATWRNLFVCIRTRKP

SEQ ID NO: 11637 - protein, 175 aa, Klebsiella pneumoniae
MAEITASLVKELRERTGAGMMDCKKALTEANGDIELAIENMRKSGAIKAAKKAGNVAADGVIKTKIEGNYGYILEVNCQTDFVAKDGGFQAFADKVLDAAVAGKISDVEVLKAQFEEERVALVAKIGENINIRRIAVLEGDVLGSYQHGARIGVLVAAKGADEELGKQLAMHVAV

SEQ ID NO: 11638 - protein, 260 aa, Klebsiella pneumoniae
MSSNLLPLEADERITAILPVREYEEGVNVFMATASGTVKKTALTEFSHPRSAGIIAVNGNEGDELIGVDLTSGQDEVMLFSAAGKFVRFKEDAVRAMGGTATGVRGIKLAENDSVVSLIIPRGEGAILTVTQNGYGKRTAAAEYPTKSRATQGVISIKVTERNGSVVGAVQVDDCDQIMMITDAGTLVRTRVSEVSIVGRNTQGVILIRTAEDENVVGLQRVAEPVDDEELDAIDGSAAEGDDDIAPEADTDDDIAEDEE

SEQ ID NO: 11639 - protein, 62 aa, Klebsiella pneumoniae
MPFDVALRRFKRSCEKAGVLAEVRRREFYEKPTTERKRAKASAVKRHAKKLARENARRTRLY

SEQ ID NO: 11640 - protein, 266 aa, Klebsiella pneumoniae
MASENMTPQDYIGHHLNNLQLDLRTFSLVDPHNHTATFWTLNIDSMFFSVVLGLLFLAMFRSVAKKATSGVPGKFQTFIEMIIGFVHGSVKDMYHGKSKVIAPLALTVFVWVFLMNLMDLLPIDFLPWIGEHILGLPALRVVPSADVNITLSMALGVFILIIFYSIKMKGVGGFVKELTMQPFNHWAFIPVNLILEGVSLLSKPVSLGLRLFGNMYAGELIFILIAGLLPWWSQWVLNVPWAIFHILIITLQAFIFMVLTIVYLSI

SEQ ID NO: 11641 - protein, 150 aa, Klebsiella pneumoniae
MTDNNTALKKAGLKVTLPRLKILEVLQEPDNHHVSAEDLYKRLIDMGEEIGLATVYRVLNQFDDAGIVTRHNFEGGKSVFELTQQHHHDHLICLDCGKVIEFSDDSIELRQREIASRHGIRLTNHSLYLYGHCAEGDCREDEHAHDAVEK

SEQ ID NO: 11642 - protein, 166 aa, Klebsiella pneumoniae
MTMALCVEMLISGKLAADDAEARANCQAVLDNGKAAEVFGRMVAAQKGPSDFIENYANYLPTAMLSKAVYADTEGFISAMDTRALGMAVVSMGGGRRQASDTIDYSVGFTEMARLGDRVDGQRPLAVIHAKDENSWQEAAKAVKAAIKLDDKAPEITPTVYRRITE

SEQ ID NO: 11643 - protein, 103 aa, Klebsiella pneumoniae
MQNQRIRIRLKAFDHRLIDQSTAEIVETAKRTGAQVRGPIPLPTRKERFTVLISPHVNKDARDQYEIRTHKRLVDIVEPTEKTVDALMRLDLAAGVDVQISLG

SEQ ID NO: 11644 - protein, 218 aa, Klebsiella pneumoniae
MQWFISANAFIFALLAALLLDGITRWTQVATSGVILFGIALVFTFNALVSMLQFIANEDTLQGLVFWTMGSIDRASWSKVAILLVALALVMPLSLRSAWKLTALRLGEDRAISFGINVRRLRLTTLLRISILSALSVAFVGPIGFIGLVAPHIARMLFGEDHRFYLPASALIGALVLSLASIASKNLIPGAIIPVGIVTSLVGVPFFLSIILRHRGQV

SEQ ID NO: 11645 - protein, 303 aa, Klebsiella pneumoniae
MYDLLERKMAHQPRWTMSQVTELFNKPLIDLLFEAQQIHRQHFDPRQVQVSTLLSIKTGACPEDCKYCPQSARYKTGLEAERLMEVEQVLESARQAKNAGSTRFCMGAAWKNPNDRDMPYLEQMVKGVKALGLESCMTLGTLTDSQAQRLAEAGLDYYNHNLDTSPEFYGNIITTRTYQERLDTLDKVRDAGIKVCSGGIVGLGESVKDRAGLLLQLANLPTPPESVPINMLVKVKGTPLADNDDVDAFDFIRTIAIARILMPTSYVRLSAGREQMNEQTQAMCFMAGANSIFYGCKLLTTPN

SEQ ID NO: 11646 - protein, 273 aa, Klebsiella pneumoniae
MPCEELDIVWNNIKAEARALADCEPMLASFYHATLLKHENLGSALSYMLANKLASPIMPAIAIREVVEEAYAADPEMIASAACDIQAVRTRDPAVDKYSTPLLYLKGFHALQAYRIGHWLWTQGRRALAIFLQNQVSVSFQVDIHPAAKIGRGIMLDHATGIVVGETAVIEDDVSILQSVTLGGTGKTSGDRHPKIREGVMIGAGAKILGNIEVGRGAKIGAGSVVLQPVPPHTTAAGVPARIVGKPESDKPAMDMDQHFNGIHHTFEYGDGI

SEQ ID NO: 11647 - protein, 56 aa, Klebsiella pneumoniae
MNKTDLAPYVGASLEVMASDTQRMRGDRPWTFTNLKQGDGLSTIIAFLEDKGMLGK

SEQ ID NO: 11648 - protein, 200 aa, Klebsiella pneumoniae
MAEKFTQHTGLVVPLDAANVDTDAIIPKQFLQKVTRTGFGAHLFNDWRFLDDKGQQPNPEFVLNFPEYQGASILLARENFGCGSSASTPWALTDYGFKVVIAPSFADIFYGNSFNNQLLPVTLSDEQVDELFKLVQANPGITFEVDLEAQVVKAGDKTYSFKIDDFRRHCMLNGLDSIGLTLQHEAAISDYERKLPVFMN

SEQ ID NO: 11649 - protein, 138 aa, Klebsiella pneumoniae
MSTALKSTPCTPNMPKCRRGGRCGAGGETRGNRVIAVGTTSVRSLESAAQAAKDALIAPFFDDTQIFIYPGYQYQVIDALVTNFHLPESTLIMLVSAFAGYQHTMNAYKVAVEQKYRFFSYGDAMFITYNPQAISERP

SEQ ID NO: 11650 - protein, 105 aa, Klebsiella pneumoniae
MASMKTSDCFSDAGASMKFELDTTDGRARRGRLVFERGVVETPAFMPVGTYGTVKGMTPEEVEATGAQIILGNTFHLWLRPGQEIMKLHGDLHGFMQWKGPILTD

SEQ ID NO: 11651 - protein, 72 aa, Klebsiella pneumoniae; identical to SEQ ID NO: 10111

SEQ ID NO: 11652 - protein, 208 aa, Klebsiella pneumoniae
MPVAIRTTIARLIIFFIGTVFVLAALIPMQQAGVEKSPFVLVFEKVGIPYAADMFNFVILTAILSAANSGLYASGRMLWSLSNEKTLPACFAKVNKRGVPVTALSVSMLGGVLALFSSVVAPDTVFVALSAISGFAVVAVWLSICASHFMFRRRHLQQGKALSDLQYRAPWYPVVPVLGFVLCLVACVGLAFDPSQRIALWCGIPFVV

SEQ ID NO: 11653 - protein, 241 aa, Klebsiella pneumoniae
MSIDLSKLLTERRNANSANIDTLSTLEMLTVINQEDQQVAQAITPYLPQIAEVVDKVAAALQAGGRLIYIGAGTSGRLGILDASECPPTFGTRPEQVVGIIAGGHKAILSAVENVEDNKAQGAMDLQNLNFSNRDVLVGLAASGRTPYVIGAMEYAHSQNAFVAIVSCNPHGEMAQLADVAITPVVGPEVVTGSTRLKAGTAQKLVLNMISTGAMIRVGKVYSNLMVDVEATNAKLIERQV

SEQ ID NO: 11654 - protein, 179 aa, Klebsiella pneumoniae [sequence omitted]

SEQ ID NO: 11655 - protein, 128 aa, Klebsiella pneumoniae
MSCEPQLTKRLGVHQRVTYYLGKLLMKTFTAKPETVKRDWYVVDATGKTLGRLATELARRLRGKHKAEYTPHVDTGDYIIVLNAEKVAVTGNKREDKMYYHHTGHIGGIKEATFEEMIARRPERVIEI

SEQ ID NO: 11656 - protein, 240 aa, Klebsiella pneumoniae
MIKVGVIVGAEQQVAEVAQKVAKEKYGLDVELVTFNDYVLPNEALSKGDIDVNAFQHKPYLDQQIKDRGYKLVAVGNTFVYPIAGYSKKIKSLDELQPGSQIAVPNDPTNLGRSLLLLQQVGLIKLKDGVGLLPTSLDIVENPKNLKIVELEAPQLPRSLDDAQIALAVINTTYASQIGLTPAKDGIFVEGKESPYVNLIVAREDNKDAENVKKFVQAYQSDEVYEAANKIFNGGAVKGW

SEQ ID NO: 11657 - protein, 204 aa, Klebsiella pneumoniae
MYFYQPSQGHGLPHDPLNAIIGPRPIGWIASQDAEGQRNLAPYSFFNCFNYRPPIIGFASSGWKDSVRNIVETKEFVWNLATRPLAMAMNETSASIPHHEDEFVRAGLTAAASRLVSAPRVAESPVNFECRLSQCIQLTTADGNPVDTWLVLGEVVAVHIDESLLDVGIYQTARAQPILRAGGPSAYYGIDDSLRFDMIRPDAR

SEQ ID NO: 11658 - protein, 249 aa, Klebsiella pneumoniae
MRFVRRNNNTISVAGRPILKLRNVSKHSCPVSALTDIELEVHAGEVVALVGDNGAGKSTLVKILAGVHQPTSGTIEFDGNPVTLDSPGKALEYGIATVFQDLALCENLDVVANLFLGHEISPFQLDEVAMEVKAWTLLQELAARIPSVREPVASLSGGQRQTVAIARSLLLNPKIIMLDEPTAALGVAQTAEVLNLIERVRERGLGVIIISHNMEDVRAVADRIVVLRLGRNKGIFTPDASNQDLVAAI

SEQ ID NO: 11659 - protein, 139 aa, Klebsiella pneumoniae
MGSELLAKFVNILMVDGKKSTAETIVYSALETLAQRSGKSELEAFEVALENVRPTVEVKSRRVGGSTYQVPVEVRPVRRNALAMRWIVEAARKRGDKSMALRLANELTDAADNKGTAVKKREDVHRMAEANKAFAHYRW

SEQ ID NO: 11660 - protein, 196 aa, Klebsiella pneumoniae
MVFDAVITEAGKKNVTVEVLSGEPDDRESPLHIHLGQVMSRGEKMEFTIQKSIELGVSLITPLFSERCGVKLDAERLQKKIQQWQKIAIAACEQSGRNVVPEIRPAMQLEAWCAEQDSGLKLNLHPRASASINDVPLPVERVRLLIGPEGGLSAEEIAMTAQYQFTDILLGPRVLRTETTALTAITALQVRFGDLG

SEQ ID NO: 11661 - protein, 224 aa, Klebsiella pneumoniae
MRVYVTGNITVDETWSIPDIPKKGASIHGVKVSQDIGGKGANQAIILSRCGIETRLIAATGNDSNGAWIRQQIKNEPLMLLPDGHFNQHSDTSIILNSADGDNAIITTTAAADTFSLDEMIPHMADAVAGDILLQQGNFSLDKTRALFQYARSRGMTTVFNPSPVNPDFCHLWPLIDIAVVNESEAELLQPYGVKTLVITQGAAVALGQGGPASVLSRRARRSA

SEQ ID NO: 11662 - protein, 215 aa, Klebsiella pneumoniae
MAGRGAELQQARSAGAAPQVATVFQDPDQQIFYTDIDSDIAFSLRNLGVAEEEIARRVDEALTLVDAQGFRQQPIQCLSHGQKKRVAIAGALVLQARYLLLDEPTAGLDPRGRAQMIAIIRRIVGQGRHVVISSHDIDLIYEVSDAVYVLRHGEVLAAGDPGEVFACAETMDRAGLTQPWLVKLHSELGLPLCKTEAEFFQRMHNNAIGAIKEAS

SEQ ID NO: 11663 - protein, 193 aa, Klebsiella pneumoniae
MAQHISLTNFLDSGLYTSLTERLVAAQRHIDNEVKVTDSLKDSFDDTNNNLFQLGADNIFLGRKAATKEEAIRFAGEQLVKGGYVEPEYVQAMLDREKLTSTYLGESIAVPHGTIEAKDRVLKTGVVFCQYPEGVRFGEEEDEVARLVIGIAARNNEHIQVITSLTNALDDETVIERLAKTTSVDEVLALLNK

SEQ ID NO: 11664 - protein, 160 aa, Klebsiella pneumoniae
MAQRVQLTATVTENQLGQRLDQALAELFPDYSRSRIKEWILDQRVLVNGTIGDKPKEKVLGGERIAIDVEIEEEARFQPQDIPLNIVYEDDDIIVINKPRDLVVHPGAGNPDGTVLNALLHYYPPIADVPRAGIVHRLDKDTTGLMVVAKTIPAQTRLVE

SEQ ID NO: 11665 - protein, 189 aa, Klebsiella pneumoniae
MSSAQVVRVPTNEPIIIKRMLDIGFYNFLVPFVETAEQAAQAVASTRYPPEGIRGVSVSHRGNMFGTVPDYFAQSNKNISILVQIESQTGVDNVEAIAAAEGVDGVFVGPSDLAAALGHLGNAAHPEVQRAIQHIFASAKKHGKPSGILAPVEADARRYLEWGATFVAVGSDLGVFRSATQKLADAFKK

SEQ ID NO: 11666 - protein, 232 aa, Klebsiella pneumoniae
MIKLSNITKVFQQGNRSIQALNNVSLHVPAGQIYGVIGASGAGKSTLIRCVNLLERPTEGSVQVDGQELTALSEKELTRARRQIGMIFQHFNLLASRTVFGNVALPLELDNTPQREIKRRVTELLDLVGLGDKHDSYPANLSGGQKQRVAIARALASNPKVLLCDEATSALDPATTRSILELLKDINRRLGLTILLITHENDVVKRICDCVAVNSNGQLIEQDTVNEFFSHP

SEQ ID NO: 11667 - protein, 292 aa, Klebsiella pneumoniae
MADERVRKRWIRARDLFQRLAEIQFESGYPYIMFEDTVNRASPVAGRVTMSNLCSEILQVSTPSAYNEDLSYAHIGEDISCNLGSLNIAHTMDSPDFGRTIATAVRALTAVSDMSDIQSVPSVAAGNAASHAIGLGQMNLHGYLAREGIAYGSPEGLDFTNIYFYTVTWHALHTSMQLARERGQRFAGFEQSRYASGAYFDKYLQEEWQPKTERVRTLFARAGISLPDRESWRHCATMSCAMASTIAICRRCRPPARSRTSTMPPPAFTRSSRRLRSAKRGKPDGCTTPRHL

SEQ ID NO: 11668 - protein, 239 aa, Klebsiella pneumoniae
MRLDKFIAQQLGVSRAIAGREIRGSRVTVDGDIVKDASFKLQPEHEVEYDGNTLTQQNGPRYFMLNKPQGYVCSTDDPDHPTILYFLDEPVAHKLHAAGRLDIDTTGLVLMTDDGQWSHRITSPRHHCEKTYLVALESPLAEGTAELFAKGVQLHNEKDLTKPALLEVITPTEVRLTISEGRYHQVKRMFAAVGNHVVGLHRERIGDILLDESLAPGEYRPLTEAEIASVGAPQPRSKT

SEQ ID NO: 11669 - protein, 143 aa, Klebsiella pneumoniae
MAKNIQAIRGMNDYLPGETALWQRIEGSLKQVLGSYGYSEIRLPIVEQTPLFKRAIGEVTDVVEKEMYTFEDRNGDSLTLRPEGTAGCVRAGIEHGLLYNQEQRLWYVGPMFRHERPQKGRYRQFHQIGAEVFGLQGRTSTRS

SEQ ID NO: 11670 - protein, 139 aa, Klebsiella pneumoniae
MTVEYTVIEKVPSAEAFCHLRVAAGMSPRPLEGARAGLPHSCYGVHILWQETPIAMGRIVGDGAINFDIVDVAVDPAHQGKGLGRLVMEKLVAWLDANAFDGAYVTLVADVPELYAKFGFESVRPESEGMARVWRTRSR

SEQ ID NO: 11671 - protein, 193 aa, Klebsiella pneumoniae
MRRKPTAGTGRHAWTIHNHANVFARSGLDIGARFFLQHLPSDLEGEIADLGCGNGVIGLQALAQNPNASVMFTDESHMAVASSRLNVERNLPDDIARCEFMVNNSLSGIEPDRFTAILCNPPFHQQHAITDHIAWQMFNDARRSLKYGGELYVVGNRHLDYFRKLKRAFGNCTTIATNNKFVILKATKVRKQR

SEQ ID NO: 11672 - protein, 246 aa, Klebsiella pneumoniae
MNHTIQVFSRPQGRVYFAFTGESMLPDSSTRLNKYISESGICSRREADRFIEQGNVFINGKRATIGDQVKPGDLVKVNGQLIEPREADDLVLIALNKPVGIVSTTEDGERDNIVDFVNHSKRIFPIGRLDKDSQGLIFLTNHGDLVNKILRAGNDHEKEYLVTVDKPVTDEFIRGMGAGVPILGTVTKKCKVKKEAPFVFRITLVQGLNRQIRRMCEHFGYEVTKLERTRIMNVSLTGIPWVNGVI

SEQ ID NO: 11673 - protein, 561 aa, Klebsiella pneumoniae
MAGNQEKEAISPYELLHEDFPMLSQIQRFGGAMFTPVLLFPFAGIVVGIAIMLRNPMFVGEALTAPDSLFAQIVHIIEEGGWTVFRNMPLIFAVGLPIGLAKQAQGRACLAVLVSFLTWNYFINAMGMTWGHFFGVDFSAEPTAGSGLTMIAGIKTLDTSIIGAIVISGLVTALHNRYFDKPLPVFLGIFQGSSFVVIVAFLAMIPCAWLTLLGWPKVQLGIESLQAFLRSAGALGVWVYIFLERILIPTGLHHFVYGPFIFGPAVVEGGLQVYWAEHLQAFSQSTEPLKTLFPEGGFALHGNSKVFGSVGIALALYFTAAPENRVKVAGLLIPATLTAMLVGITEPLEFTFLFISPLLFAVHAVLAATMATVMYICGVVGNFGGGLLDQFLPQNWIPMFHQHASMMFIQIGIGLCFTALYFVVFRTLILRLNLKTPGREESEIKLYSKADYQAARGKTTAAAAPETRLGQAAGFLQALGGADNIESINNCATRLRIALVDMAKTQSDDVFKALGAHGVVRRGNGIQVIVGLHVPQVRDQLENLMKDSLSTEHTTMTEAVS

SEQ ID NO: 11674 - protein, 478 aa, Klebsiella pneumoniae
MVFASLLERQRVRLLLALLFGASGTLAFSPYDFWPAAIVSLIGLQALTLNRRPLQSAGIGYFWGLGLFGTGINWVYVSIAQFGGMPGPVNVFLVVLLAAYLSLYTGLFAGLLARLWPKTNWIRMAIAAPVVWQITEFLRGWVLTGFPWLQFGYSQIDGPLKGLAPVMGVEAINFLLMVVSGLLALALVQRNWKPLAIAALLFALPFPLRYIQWYQLLPARATQVSLVQGDIPQAMKWDEKQLVNTLKTYLALTQPHIGHSQLIIWPESAIPDLEINQQQFLSMMDDLLRAKDSSLITGIVDARLNKQNRYDTYNTIITLGKDNPYRYDSTNRYNKNHLVPFGEFVPLESILRPLAPFFDLPMSSFSRGPYVQPQLMAHNLKLTAAICYEIILGEQVRDNFRPDTDFLLTISNDAWFGKSIGPWQHFQMARMPPLELARPLLRTSNNGITAVIGPRGEIQKMIRSYPRSVDTHVTPAAA

SEQ ID NO: 11675 - protein, 360 aa, Klebsiella pneumoniae
MKSSIVAKLEALYERHEEVQALLGDAATIADQDKFRALSREYAQLSDVARCYTDWRQVQEDIETAQMMLDDPEMREMAQEELRDAKEKGDQLEQQLQVLLLPKDPDDERNAFVEVRAGTGGDEAALFAGDLFRMYTRYAESRRWQVEILSANEGEHGGFKEVIAKISGDGVYGRLKFESGGHRVQRVPATESQGRIHTSACTVAVMPELPEAEMPDINPADLRIDTFRSSGAGGQHVNTTDSAIRITHLPTGIVVECQDERSQHKNKAKALSVLGARIRAAEVAKRQQAEASTRRNLLGSGDRSDRNRTYNFPQGRVTDHRINLTLYRLDEAMEGKLDMLIEPIVQEHQADQLAALSEQE

SEQ ID NO: 11676 - protein, 276 aa, Klebsiella pneumoniae
MTDIAIVAAVRTPVGSFRGAFAPLSAVDLGAAVVRGLLERCQLPAAAVDELIFGQVLTAGCGQNPARQTALRAGLPVDTPAVTVNLVCGSGLKAVQQAVQAIRCGDAGIVIAGGQESMSNAPYLMHGARDGLRFGHASLQDSMIQDGLWDAFNDYHMGITAENLADAFDISRERQDAFAASSQRKAAAAIAAGRFREEIVPVSVPQGKKPPRVVTDDEQPRPETSEQQLAQLRPAFRPADGSVTAGNASSLNDGAAAVLLMRVDKARELGLPVLAL

SEQ ID NO: 11677 - protein, 266 aa, Klebsiella pneumoniae
MALLNVDKLSVHFGDENAPFRAVDRISYSVKQGEVVGIVGESGSGKSVSSLAIMGLIDYPGRVMADKLEFNGRDLQRISEKERRQLVGAEVAMIFQDPMTSLNPCFTVGYQIMEAIKVHQGGNKQTRRQRAIDLLNLVGIPDPASRLDVYPHQLSGGMSQRVMIAMAIACRPKLLIADEPTTALDVTIQAQIIELLLDLQQQENMALVLITHDLALVAEPRIKLSLCTRVRWWRPVTRKISSARRAILIPRRYYARYRNSPKIKRV

SEQ ID NO: 11678 - protein, 253 aa, Klebsiella pneumoniae
MAIPKLQAYALPEASDIPANKVNWAFEPSRAALLIHDMQEYFLNFWGENSAMMEKVVANIAALRDFCKQNGIPVYYTAQPKEQSDEDRALLNDMWGPGLTRSPEQQQVIAALAPDEDDTVLVKWRYSAFHRSPLEEMLKETGRDQLIITGVYAHIGCMTTATDAFMRDIKPFFVADALADFSREEHLMALKYVAGRSGRVVMTEELCRSQPPKALRALILPLLDESDEPLDDENLIDYGLDSVRMMALAARGV

SEQ ID NO: 11679 - protein, 273 aa, Klebsiella pneumoniae
MAVVKCKPTSPGRRHVVKVVNPELHKGKPFAPLLEKNSKSGGRNNNGRITTRHIGGGHKQAYRIVDFKRNKDGIPAVVERLEYDPNRSANIALVLYKDGERRYILAPKGLKAGDQIQSGVDAAIKAGNTLPMRNIPVGSTVHNVEMKPGKGGQLARSAGTYVQIVARDGAYVTLRLRSGEMRKVEADCRATLGEVGNAEHMLRVLGKAGAARWRGVRPTVRGTAMNPVDHPHGGGEGRNFGKHPVSPWGLQTKGKKTRSNKRTDKFIVRRRSK

SEQ ID NO: 11680 - protein, 347 aa, Klebsiella pneumoniae
MSGVDGLLHITDMAWKRVKHPSEIVNVGDEITVKVLKFDRERTRVSLGLKQLGEDPWVAIAKRYPEGTKLTGRVTNLTDYGCFVEIEEGVEGLVHVSEMDWTNKNIHPSKVVNVGDVVEVMVLDIDEERRRISLGLKQCKSNPWQQFAETHNKGDRVEGKIKSITDFGIFIGLDGGIDGLVHLSDISWNVAGEEAVREYKKGDEIAAVVLQVDAERERISLGVKQLAEDPFNNYVALNKKGAIVVGKVTAVDAKGATVELADGVEGYLRASEASRDRVEDATLVLSVGDEVEAKFTGVDRKNRVVSLSVRAKDEAEEKDAIATVNKQEDANFSNNAMAEAFKAAKGE

SEQ ID NO: 11681 - protein, 335 aa, Klebsiella pneumoniae
MGAAASGRQPEGFTNKGHRSIWDSWFAEQPERFYQQVGPQTVCDTYHQYPQDVALMKQTGFNSFRTSIQWSRLIADLETGAPDPDAVRFYHAYLDEMIANGIEPMINLYHFDMPEALQKQYGGFESAHVAELFARFARTAFSLFGHKVKYWITFNEPIVPVEGGYLYDFHYPCKKDGRLAAQVAFNIMLAHAKAVTAYRELALAGEIGVVLNLTPSYTLTDSDADKKAAGYADLFFNRSFLDPLVKHEFPKALCEILAAHDCLPTTSKDDAALILSADIDFLGVNYYVPRRVKARESEYDLDYFTPEYYFENAVNPQGRFNPYRDNNEILPQVML

SEQ ID NO: 11682 - protein, 105 aa, Klebsiella pneumoniae
MEDLETIIMELLVNAGSARSAALTALQLARKGDFVAAEQAMAESHEFVKHAHKIQTQLIGMDEGSGKLPVNLITVHSQDHLMNAMVIQDLATDMIELYRRLPLAQ

SEQ ID NO: 11683 - protein, 260 aa, Klebsiella pneumoniae
MPLYGARRIRRWRNYLQGKKVVIVGCGAQGLNQGLNMRDSGLDISYALRKEAIAEKRASWRKATENGFKVGTYEELIPQADLVVNLTPDKQHSDVVRSVQPLMKDGARLGYSHGFNIVEVGEQIRKDITVVMVAPKCPGTEVREEYKRGFGVPTLIAVHPENDPKGEGMAIAKAWAAATGGHRAGVLESSFVAEVKSDLMGEQTILCGMLQAGSLLCFDKLVAEGTDPAYAEKLIQFGWETITEALKQGGITLMMDRLSN

SEQ ID NO: 11684 - protein, 320 aa, Klebsiella pneumoniae
MTAAADLADAQAVCDKLGIELHTVNFAAEYWDNVFELFLEEYKAGRTPNPDILCNKEIKFKAFLEFAAEDLGADYIATGHYVRRADVDGKSQLLRGLDGNKDQSYFLYTLSHEQIAQSLFPVGELEKPQVRKIAEELDLITAKKKDSTGICFIGERKFRDFLGRYLPAQPGKILTVDGEEIGTHQGLMYHTLGQRKGLGIGGTKEGSEDPWYVVDKDVENNILIVAQGHDHPRLMSVGLIAQQLHWVNREPLQGTLRCTVKTRYRQTDIPCTVTALDEDRIEVRFDEPVAAVTPGQSAVFYLGEVCLGGGIIEQRLPLQS

SEQ ID NO: 11685 - protein, 270 aa, Klebsiella pneumoniae
MAIKLIAIDMDGTLLLPDHTISPAVKAAIAAARERGVNVVLTTGRPYAGVHSYLKELHMEQPGDYCITYNGALVQKAGDGSTVAQTALSYDDYRFLEQLSREVGSHFHALDRNTLYTANRDISYYTVHESYVATIPLVFCEAEKMDPEIQLLKVMMIDEPAILDQAIARIPAEVKEKYTVLKSAPYFLEILDKRVNKGTGVKSLADALGIKPEEIMAIGDQENDIAMIEFAGVGVAMDNAIPAVKEAANFITKSNLEDGVAFAIEKYVLA

SEQ ID NO: 11686 - protein, 207 aa, Klebsiella pneumoniae
MLNKLSRLLDEAGISLTDHQKNQLVAYVGLLDKWNKAYNLTSVRDPNEMLVRHILDSIIVAPYLQGSRFIDVGTGPGLPGIPLAIVCPESHFTLLDSLGKRVRFLRQVQHELKLDNVTPVQSRVEAFPAEPPFDGVISRAFASLNDMVSWCHHLPAANGHFYALKGLAQKEEMESLPEGYDIVEVIELHVPRLEGERHLVVIKPKSS

SEQ ID NO: 11687 - protein, 301 aa, Klebsiella pneumoniae
MRNRTFADLDRVVALGGGHGLGRVMSSLSSLGSRLTGIVTTTDNGGSTGRIRRSEGGIAWGDMRNCINQLIAEPSVASAMFEYRFGGNGELSGHNLGNLMLKALDHLSVRPLEAINLIRNLLKVDAFLIPMSEQPVDLMALDHEGHEVYGEVNIDQLDNVPQELMLTPPVPATREAVEAIAEADLILIGPGSFYTSLLPILLLDEMAQALRRTPAPMVFIDNLGKEHSPAARLSLAERIAIMECYVGKRVVDAVIAGPKADISGIDDRLVIQTPLEASDVPYRHDRALLRGALEKAIQLPG

SEQ ID NO: 11688 - protein, 105 aa, Klebsiella pneumoniae
MLNARELKVFYGVIQGLKGVDIDVYDREIVTLIGSNGAGKTSTLNGIVNLVRSSGRVSFLNDDISRSQTHQIVRRGLALVPEGRRVFTNLTIEENLRMGAYNNLV

SEQ ID NO: 11689 - protein, 288 aa, Klebsiella pneumoniae
MGVTKGLWTQFGSDRVIDTPITESAIIGMAAGAAATGLRPVAELMFMDFFGVSHDALYNQAAKFRYMFGGKARAPLVMRGMIGAGFSAAAQHSQSPYNIFATTPGLKVVVPSTPYDVKGLLIQSIRDDDPVVFCEHKMLYDLKGEVPDESYTIPLGVANYTREGEDVTIIALSAMVHKANQVADKLAKEGISVEVVDPRTISPLDEEGILESVASTGRVVIVDESAARFGFAHDVAALIASQAFHFLKAPVLLVTPPHTPVPFSPALEKLWIPGVERIEAAVRQVLED

SEQ ID NO: 11690 - protein, 298 aa, Klebsiella pneumoniae
MKQDLALIEQFLDALWLERNLAENTLSAYRRDLTMLVEWLHHRGLSLASVGSDDLQALLAERQSGGYKATSTARLLSAVRRFFQHLYREKIRPDDPSALLASPKLPQRLPKDLSEAQVERLLQAPLVEQPLELRDKAMLEVLYATGLRVSELVGLTMSDISLRQGVLRVVGKGNKERLVPLGEEAVLWVENYLEYGRPWLLNGVASDVLFPSQRAQQMTRQTFWHRIKHYAVLAGIDSEKLSPHVLRHAFATHLLNHGADLRVVQMLLGHSDLSTTQIYTHVATERLRQLHQQHHPRA

SEQ ID NO: 11691 - protein, 360 aa, Klebsiella pneumoniae
MLVWLAEHLVKYYSGFNVFSYLTFRAIVSLLTALFISLWMGPRMIARLQKLAFGQVVRNDGPESHFSKRGTPTMGGIMILTAITVSVLLWAYPSNPYVWCVLTVLIGYGIIGFVDDYRKVVRKDTKGLIARWKYFWMSVIALGVAFALYLAGKDTPATELVVPFFKDVMPQLGLFYILLAYFVIVGTGNAVNLTDGLDGLAIMPTVFVAAGFALVAWATGNMNFANYLHIPYLRHAGELVIVCTAIVGAGLGFLWFNTYPAQVFMGDVGSLALGGALGIIAVLLRQEFLLVIMGGVFVVETLSVILQVGSFKLRGQRIFRMAPIHHHYELKGWPEPRVIVRFWIISLMLVLIGLATLKVR

SEQ ID NO: 11692 - protein, 385 aa, Klebsiella pneumoniae
MHIFEGNWVFLAHESQIPQPGDYYTLTLGRQPVIITRDKKNELHALINSCAHRGAMLCRRKTGNKNSFTCPFHGWTFSNNGKLLKAKDESTGAYPETFKHEGSHDLQKLPRFQSYRGFLFGSLNADVQPLEAYLGETCKIIDLIVDQAPEGLEVLKGSSSYVYEGNWKLGAENGADGYHVSVVHWNYASTMSRRNYEAEGTHTVDANGWSKSLGGGYGFDNGHMLLWTRALNPEVRPVYAHRERLQAEFGERRADQMVNETRNLCLYPNVYLMDQFSTQIRVIRPIAVDKTEVTIWCFAPKGESDQARALRIRQYEDFFNVSGMGTPDDLEEFSACQRGYLGENLPWSDLSRGALRWVDGADEHAQHAGFSPRLSGVESADEALY

SEQ ID NO: 11693 - protein, 180 aa, Klebsiella pneumoniae
MSALTLFSVTDPQTPVWHSTDAKAIQDQLNAKGVRFERWQADRDLGANPSPETVIAAYQHAIDKLVAEKGYQSWDVISLRADNPQKEALREKFLNEHTHGEDEVRFFVEGAGLFCLHIGDEVFQVLCEKNDLISVPAHTPHWFDMGSEPNFTAIRIFDNPEGWIAQFTGDDIASAYPRLA

SEQ ID NO: 11694 - protein, 242 aa, Klebsiella pneumoniae
MKTFAAENLLNQIKERGTLRVGLEGTYPPFSFQGDDGKLTGFEVEFANELAKHLGVKADLKPTKWDGMLASLDSKRIDVVINQVTISDERKKKYDFSTPYTVSGVQALVKKGNEGVIKTAADLKGKKVGVGLGTNYEEWLRQNVQGVDVRTYDDDPTKYQDLRVGRIDAILVDRLAALDLVKKTNNTLAVTGEAISRQEAGVALRKGNDDLLKAVDGAIADMQKDGSLKALSEKWFGADVTK

SEQ ID NO: 11695 - protein, 347 aa, Klebsiella pneumoniae
MSCALAGRPGRNTHLTEPFMNYTHLGRTGLKVSRLCLGTMNFGDVTDEKTSARILDEALEAGINFIDTADVYGTEQSPDIQQGSGLSEEIIGRWLQQGGRRERIVLATKVYQPMGPGPNDRRLSAYHIRKACEDSLRRLNTDHIDVYQMHHIDRHTPWEEIWQAMELLVQQGKVLYIGSSNFAGWDIATAQSVATARHFLGLVAEQSLYNLTARTIELEVIPACRHFGLGLIPWSPLAGGLLGGVLKKMASGRRARPAFARLIEQYRPQLEAYEGLCEDLGETPSDVALAWLLQNPVVTAPLIGPRTVEQLQQALHATTVTLSDDTMSCLDEIWPGPGGEAPQAYAW

SEQ ID NO: 11696 - protein, 422 aa, Klebsiella pneumoniae
MNNVVTKEEGGYMDKLLERFLQYVSLDTQSKPGVRQVPSTEGQWKLLRLLQAQLEEMGLVKVTLSEKGTVMGTLPANVEGDIPAIGFISHVDTSPDFSGKNVNPQIVENYRGGDIALGIGDEVLSPVMFPVLHQLLGQTLITTDGKTLLGADDKAGIAEIMTALATLQAKNIPHGDIRVAFTPDEEVGKGAKHFDVEAFDARWAYTVDGGGVGELEFENFNAASVTIKIVGNNVHPGTAKGVMVNALSLAARIHAEVPADEAPETTEGYEGFYHLTSMKGSVDRAEMHYIIRDFDRKHFEARKRKMMEIAKKVGKGLHPDCYIELVIEDSYYNMHEQVIAHPHVVDIARQAMVDCDIEPQMKPIRGGTDGAQLSFMGLPCPNLFTGGYNYHGKHEFVTLEGMEKAVQVIVRIAELTAARKGH

SEQ ID NO: 11697 - protein, 122 aa, Klebsiella pneumoniae
MVCPGAGRVHLRRRCRRLAGDCCAARGLILFTTAALITATIVSMAGSIGFVGLVVPHVMRFFFGPLHRTLLIASALAGAILMVLADIASRLLIAPQSLPVGVVTALVGVPFFAVIIYRSRNK

SEQ ID NO: 11698 - protein, 471 aa, Klebsiella pneumoniae
MGAPIPEGLLHEGIFRIALQQPQALAVTDMRYQWNYHELTDYARRCAGRLIECGVQPGDNVAITMSKGAGQLVAVLAVLLAGAVYVPVSLDQPAARREKIYADASVRLVLICQHDASAGSDDIPVLAWQQAIEAEPIANPVVRAPTQPAYIIYTSGSTGTPKGVVISHRGALNTCCDINTRYQVGPHDRVLALSALHFDLSVYDIFGVLRAGGTLVMVMENQRRDPHAWCELIQRHQVTLWNSVPALFDMLLTWCEGFADATPENLRAVMLSGDWIGLDLPARYRAFRPQGQFIAMGGATEASIWSNACEIHDVPAHWRSIPYGFPLTNQRYRVVDEQGRDCPDWVPGELWIGGIGVAEGYFNDPLRSEQQFLTLPDERWYRTGDLGCYWPDGTIEFLGRRDKQVKVGGYRIELGEIESALSQLAGVKQATVLAIGEKEKTLAAYVVPQGEAFCITDHRNPALPQAWHTLA

SEQ ID NO: 11699 - protein, 409 aa, Klebsiella pneumoniae
MAQHCGSLTLDVCPTPYDQTLPAAKDMLSWDQTSRVIGFRNDYRNYIGDVFRHGASTPLERAEKQLTDARYTLNGHTWNLQDYLKRENVSGMLVLKDGKVAWKYLAEGNTDTTLWTSRSVGKSVVSTLVGIAIQQGKIHSLDDLITVYEPELKGTAWDGVTLKQLIQHTSGVEWNEDYTDPQSHFARLTQCEAHPGAYACVRKIVTGLARQHPAGEQWSYSSGGAWLLGDILERSTGMSLAAWLEQALWQPAGMAHDGVWHAYQQGKHDVGAHGFNATLEDWGRFGEFVARDGRLSNGKQLVPAGWFDQAASWTKALNSVSAAHPEGIYGYQWWNNAIPANAQNVQPTPQEGLKGSLWALGIYGQVIMVNRAEHLVIVQWSTWPQAEPSFNAQPLEAALMYSAIARELR

SEQ ID NO: 11700 - protein, 432 aa, Klebsiella pneumoniae
MKQHLGGICLNWGCIPTKALLHGAEVAHTITHASQLGISVGEVNVDLQKLVQFSRTVSQQLTAGVAYLLKKNGVQVIDGTARLRGKGQITVEDAQGEARDYRADHVILATGARPRALPGIAPDGEHIWTYFEALRPKLLPKSLLIIGSGAIGVEFASLYNDLGCKVTLVELASQILPVEDAEVSAAVRKSFEKRGIQIHTQTLVTQVQLTDTGVRCTLNNTGGEYSQDVERVLLAVGVQPNIEDLGLEALGVELDRGFIKTDAACRTNVFGLYAIGDVAGPPCLAHKASHEGVICVETLAGVEGAHPLDRDYVPGCTYARPQVASLGLTESTALARGRPVRIGKFSYQSNGKALASGETEGFVKTIFDAETGELLGAHMVGALVTEQIQGFGIARHLEATDESLLSMIFAHPTLSEAMHESILAACDQPLHQ

SEQ ID NO: 11701 - protein, 445 aa, Klebsiella pneumoniae
MKLAIHNEVAVSNDEVRQLDRAYVFHSWSMQGNLNPLVIAGAQGCELWDYEGNTWLDFSSQLVNVNIGYQHPRVLAAMKAHWRPWSPSRPPPPTLPAAYGRSASSTWRRRASVRCSSLTPGRMPMRTRFAWRGSIPGATRCCRPIVPIMATPAARSPLPATWRRVPNEFSRGHVHFFNPYLYRSEFNAATEEEECQRALAHLRRIIECEGPTAIAAILLESIPGTAGILVPPAGYMQGVRALADEFGIVLILDEVMAGFGRTGSWFAFEQDGVVPDLVTFAKGVNAGYVPAGGVLISEPIARYFDDHFFAGGLTYSGHPLAMAAIVATIDAMKEEKVVENAASIGNEVLRPGLEALAEKHAIIGEVRGRGLFQALELVSSREQKTPLTAADMAAIKGALTEAGLLAFVVENRIHVVPPCTITAEQVAQGLAIFDAVFARFASLAK

SEQ ID NO: 11702 - protein, 254 aa, Klebsiella pneumoniae
MGIRSVMTFGISHHTDATGSDTWNENGLVARMSRICKSTVPEMIVMSDTCFCEYTSHGHCGVLCDHGVDNDATLENLGKQAVVAAAAGADFIAPSAAMDGQVQAIRRSLDAAGFTNTAIMSYSTKFASSFYGPFREAAGTALKGDRKTYQMSPMNRREAIRESLLDEAQGADCLMVKPAGAYLDILRDIRERSDLPLGAYQVSGEYAMIKFAAQAGAIDEEKVVLESLGAIKRAGADLIFSYFALDLAEKKILR

SEQ ID NO: 11703 - protein, 421 aa, Klebsiella pneumoniae
MSKTHLTEQKFSDFALHPAVIEALEKKGFHNCTPIQALALPLTLEGRDVAGQAQTGTGKTMAFLTSTFHYLLSHPAIADRQVNQPRALIMAPTRELAVQIHADAEPLAQATGLKLGLAYGGDGYDKQLKVLENGVDILIGTTGRLIDYAKQNHINLGAIQVVVLDEADRMYDLGFIKDIRWLFRRMPPATQRLNMLFSATLSYRVRELAFEQMNNAEYVEVEPEQKTGHRIKEELFYPSNEEKMRLLQTLLEEEWPDRAIVFANTKHRCEDIWGHLAADGHRVGLLTGDVAQKKRLRILEEFTRGDLDILVATDVAARGLHIPAVTHVFNYDLPDDCEDYVHRIGRTGRAGASGHSISLACEEYALNLPAIETYIGHSIPVSKYNPDALMTDLPKPLRLTRARPGNGPRRNGPPRNRRRSG

SEQ ID NO: 11704 - protein, 811 aa, Klebsiella pneumoniae
MEEPRIAYDRVHLSSYFSHHTAEELSLVREGFYEKHGVKVLVGERAITINRQEKVIHSSAGRTVFYDKLIMATGSYPWIPPIKGAETQDCFVYRTIEDLNAIESCARRSKRGAVVGGGLLGLEAAGALKNLGVETHVIEFAPMLMAEQLDQMGGEQLRRKIESMGVKVHTSKNTKEIVQQGTEARKTMHFADGSELQVDFIVFSTGIRPRDKLATQCGLAVAQRGGIMVNDSCQTSDPDIYAIGECASWNNRVYGLVAPGYKMAQVAVDHLLGSENSFTGADLSAKLKLLGVDVGGIGDAHGRTPGARSYVYLDESKEVYKRLIVSADNKTLLGAVLVGDTSDYGNLLQLVLNAIELPENPDSLILPAHAGSGKPSIGVDKLPDSAQICSCFDVSKGDLIAAINKGCHTVAALKAETKAGTGCGGCIPLVTQVLNAELAKQGIEVNNNLCEHFAYSRQELFHLIRVEGIKTFDELLEKHGQGYGCEVCKPTVGSLLASCWNEYILKPQHTPLQDSNDNFLANIQKDGTYSVIPRSAGGEITPEGLVAVGRIAREFNLYTKITGSQRIGLFGAQKDDLPEIWRQLIEAGFETGHAYAKALRMAKTCVGSTWCRYGVGDSVGFGVELENRYKGIRTPHKMKFGVSGCTRECAEAQGKDVGIIATEKGWNLYVCGNGGMKPRHADLLAADLDRDTLIKYLDRFMMFYIRTADKLTRTAPWLDNMEGGIDYLRSVIIDDKLGLNDHLEEELARLRAAFACEWTETVNNPAAQTRFKHFINSDQRDPNVQVVPERDQHRPATPYERIPVTLVEEKA

SEQ ID NO: 11705 - protein, 170 aa, Klebsiella pneumoniae
MSQASAEFIPTRIAILTVSSRRGEEDDTSGHWLREAAQEAGHQVVEKAIVKENRYAIRAQVSAWIASDNVQVVLITGGTGFTDGDQAPEALLPLFDREVEGFGEVFRMLSFEEIGTSTLQSRAVAGVANRTLIFAMPGSTKACRTAWDNIIAPQLDARTRPCNFIPHLKK

SEQ ID NO: 11706 - protein, 257 aa, Klebsiella pneumoniae
MRFTDKVVVITGAAQGIGRQTAEQAAAEGAALLLIDRSSYVHELAATLAQSGCLVLALEADLEAWESTEQAFAAGVAHFGRIDVLINNVGGTIWARPFAEYQPDQIEKEIRRSLFPTLWGCRAALPWMLKQGKGSIVNISSVATAGVNRVPYSAAKGGVNALTRSIAMEYSGSGIRINAVAPGGTEAPPRLTPRNEEQPSEQEKAWYQQVVDQTVASSLLHRYGTLAEQANAILFLASDEASYITGVTLPVAGGDLG

SEQ ID NO: 11707 - protein, 263 aa, Klebsiella pneumoniae
MKPTTIALLQKCKQEKKRFATITAYDHSFAKLFADEGINVLLVGDSLGMTVQGHDSTLPVTVEDIAYHTRAVRRGAPNSLLLADLPFMAYATPEQTFANAAIVMRAGANMVKLEGGAWLADTVRMLAERAVPVCGHLGLTPQSVNVFGGYKVQGRGDAAQTLFEDALALEAAGAQLLVLECVPVELAKRITDALTIPVIGIGAGNVTDGQILVMHDAFGITGGHIPKFAKNFLAEAGDIRAAVRQYIAEVESGVYPGEEHSFH

SEQ ID NO: 11708 - protein, 361 aa, Klebsiella pneumoniae
MAGNTIGQLFRVTTFGESHGLALGCIVDGVPPGIPLTEADLQHDLDRRRPGTSRYTTQRREPDQVKILSGVFEGVTTGTSIGLLIENTDQRSQDYGAIKDLFRPGHADYTYEQKYGLRDYRGGGRSSARETAMRVAAGAIAKKYLAVKFGIVIRGCLTQMGDIPLAIKDWDQVEQNPFFCPDPDKIDALDELMRGLKKEGDSIGAKVTVVADGVPPGLGEPVFDRLDADIAHALMSINAVKGVEIGDGFEVVKLRGSENRDEITKAGFQSNHAGGILGGISSGQQIVANIALKPTSSITVPGHTINRFGEEVEMITKGRHDPCVGIRAVPIAEAMLAIVLMDHFMRQRAQNGDVTTTIPRW

SEQ ID NO: 11709 - protein, 226 aa, Klebsiella pneumoniae
MIMTQHDQLHRYLFENYAVRGELVTVSETLEQILANHTYPQPVKTVLAELLVATSLLTATLKFAGDITVQLQGDGPLQLAVINGNNQQQLRGVARVQGEIADDADLKTMVGNGYLVITISPEEGERYQGVVGLEGDTLAACLEDYFQRSEQLPTRLIIRTGDHEGQPMAGGMLLQVMPAQDAQTADFEHLATLTETIKAEELFTLPANDVLWRLYHEEEVTVYDPL

SEQ ID NO: 11710 - protein, 264 aa, Klebsiella pneumoniae
MKAAVVTHDHQVNVTEKTLRPLEYGEALLKMECCGVCHTDLHVKNGDFGDKTGVILGHEGIGVVQKVGPGVTSLKPGDRASVAWFFEGCGHCDYCNSGNETLCRSVKNAGYTVDGGMAEECIVTANYAVKVPDGLDSAAASSITCAGVTTYKAVKVSHIKPGQWIAIYGLGGLGNLALQYAKNVFNAKVIAIDVNDGQLELAASMGADLTINSRNEDAAKVIQEKTGGAHAAVVTAVAKAAFNSAVDAVRAGGRVVAVGLPRRR

SEQ ID NO: 11711 - protein, 447 aa, Klebsiella pneumoniae
MLRHETRALFAAQSFARTLLLIVTLLFVSLVTTYLVVLNFAILPSLQQFNKVLAYEVRMLMTDKLQLEDGTQLVVPPAFRREIYRELGISLYSNEAAEDAGLRWAQHYEFLSQQMAHQLGGPTEVRVEVNKSSPVVWLKTWLSPNIWVRVPLTEIHQGDFSPLFRYTLAIMLLAIGGAWLFIRIQNRPLVDLEHAALQVGRGIIPPPLREYGASEVRSVTRAFNHMAAGVKQLADDRTLLMAGVSHDLRTPLTRIRLATEMMGEQDGYLAESINKDIEECNAIIEQFIDYLRTGQEMPMELADLNAVLGEVIAAESGYEREIATALQAGEIPVRMHPLSIKRALANMVVNAARYGNGWIKVSSGSEASRAWFQVEDDGPGIKPEQREHLFQPFVRGDSARSTSGTGLGLAIVQRIIDNHNGRLEIGSSERGGLLIRAWLPVHRIWRR

SEQ ID NO: 11712 - protein, 439 aa, Klebsiella pneumoniae
MSCAGSWGWTKSMAQQKPHDVNEPSRRRLLKGIGALGGALAITGGCPVAHAAKAESSPGTLTPDARQEKQPFYGRHQAGILTPQQASMMLVAFDVLAADKADLERLFRLLTQRIAFLTQGGPAPDTPNPRLPPMDSGILGPWIAPDNLTITVSVGHSLFDERFGLADKAPKKLQPMTRFPNDSLDAALCHGDLLLQICANTQDTVIHALRDVIKHTPDLLSVRWKREGFISDSAARSKGKETPINLLGFKDGTANPASHDSALMDKVVWVTADQDEPTWTVGGSYQAARIIQFHVEFWDRTPLKEQQTIFGRDKHTGAPLGMKNEHDTPDYSKDPNGEVIALDSHIRLANPRTPETQSSLMMRRGYSYSLGVTNAGQLDMGLLFVCYQHDLEKGFLTVQKRLNGEALEEYVKPIGGGYFFVLPGVVDEKHYLGESLLQA

SEQ ID NO: 11713 - protein, 205 aa, Klebsiella pneumoniae
MSAIAPGLVLLAYLCGSISSAILVCRLAGLPDPRDSGSGNPGATNVLRIGGKGAAVAVLIFDVLKGMLPVWGAWALGLTPFWLGLVAIAACVGHIWPVFFHFRGGKGVATAFGAIAPIGLDLTGVMAGTWLLTILLSGYSSLGAIVSALIAPFYVWWFKPQYTFPVSMLSCLILLRHHDNIQRLWRRQESKIWTRVKKKKTPEQK

SEQ ID NO: 11714 - protein, 280 aa, Klebsiella pneumoniae
MVLAKSHQLLEQRYPQTHISWIEFPAGPQMLEALNVGSIDIGSTGDIPPIFAQAAGADLVYIGAEPPKPKAEVILVAQGSPIHNVAELKGKKVAFQKGSSSHNLLLRALQLAGLKFSDIQPVYLAPADARAAFQQGNVDAWAIWDPYYSAALLQGGARVLTDGTDLKQTGSFYLASRPYAERNGAFIEGVLDTFTQADALTHSQRAQSITLLAKTMGLPEAVIASYLDHRPPTAVTPVSAETAARQQQTADLFYENKLVPKKVDIRARIWQPTATQGAKS

SEQ ID NO: 11715 - protein, 416 aa, Klebsiella pneumoniae
MRNNEFNHENLQLGINEAHALGKKFYVVVNIAPHNAKLKTFIRDLKPVVEMGPDALIMSDPGLIMLVREHFPEMSIHLSVQANAVNWATVKFWQQMGLTRVILSRELSLDEIEEIRRQVPEMEIEIFVHGALCMAYSGRCLLSGYINKRDPNQGTCTNACRWEYNVAEGKEDDVGNIVHKYEPIPVQTVEPTLGIGAPTDKVFMIEEAKRPGEYMTAFEDEHGTYIMNSKDLRAIAHVERLTQMGVHSLKIEGRTKSFYYCARTAQVYRKAIDDAAAGKPFDTSLLETLEGLAHRGYTEGFLRRHTHDDYQNYEYGYSVSERQQFVGEFTGERNGPLAAVAVKNKFSVGDSLELMTPQGNVNFTLEHMENGKGETMPVAPGDGYTVWLPVPDDLPLQYALLMRNFTGQTTRNPHGN

SEQ ID NO: 11716 - protein, 495 aa, Klebsiella pneumoniae; identical to SEQ ID NO: 5040

SEQ ID NO: 11717 - protein, 309 aa, Klebsiella pneumoniae
MAPERLVKALDGVSFTLERGKTLAMVGESGCGKSTLGRLLTMIEIPTGGELYYQGQDLLKHDPQAQKLRRQKIQIVFQNPYGSLNPRKKVGQILEEPLLINSSLSKEQRREKALAMMAKVGLKTEHYDRYPHMFSGGQRQLLAIARGLMLDPDVVIADEPVSALDVSVRAQVLNLMMDLQQDLGLSYVFISHDLSVVEHIADEVMVMYLGRCVEKGTKDQIFNNPRHPYTQALLSATPRLNPDDRRERIKLTGELPSPLNPPPGCAFNARCRRRFGPCTQLQPQLKDYGGQLVACFAVDQDENPQKSHA

SEQ ID NO: 11718 - protein, 338 aa, Klebsiella pneumoniae
MAVKSLKKGYLALAASMLLVAQAQATELLNSSYDVSRELFAALNPPFEQQWAKDNGGDKLTIKQSHAGSSKQALAILQGLKADVVTYNQVTDVQILHDKGNLIPADWQSRLPNNSSPFYSTMGFLVRKGNPKNIHDWNDLVRSDVKLIFPNPKTSGNARYTYLAAWGAADKADGGDKAKTEQFMTQFLKNVEVFDTGGRGATTTFAERGLGDVLISFESEVNNIRKQYEAQGFEVVIPKTNILAEFPVAWVDKNVKANGTEKAAKAYLNWLYTPQAQTIITDYYYRVNNPKVMDALKDKFPQTELFRVEDKFGSWPEVMKTHFASGGELDKLLAAGRK

SEQ ID NO: 11719 - protein, 126 aa, Klebsiella pneumoniae
MAILGLGTDIVEIARIEAVIARSGDRLARRVLSDHEWSIWEQHQQPVRFLAKRFAVKEAAAKALGNGIRNGLAFNQFEVYNDELGKPKLRLWGEANLLAERMGVSAIHVTLADERHYACATVIVES

SEQ ID NO: 11720 - protein, 248 aa, Klebsiella pneumoniae
MSPITLRRRLDGVAVVMSGEKMKVIIVEDEFLAQQELSWLINTHSQMEIVGSFDDGLDVLKFLQHNKVDAIFLDINIPSLDGVLLAQNISQFAHKPFIVFITAWKEHAVEAFELEAFDYILKPYQESRIINMLQKLTTAWQQQNNAASGLASAAPRENDTINLIKDERIIVTSIHDIYYAEAHEKMTFVYTRRESFVMPMNITEFCSKLPTAHFFRCHRSYCVNLSKIREIEPWFNNTYVLRCVTGVH

SEQ ID NO: 11721 - protein, 320 aa, Klebsiella pneumoniae
MIKKIGVLTSGGDAPGMNAAIRGVVRAALTEGLEVFGIYDGYLGLYEDRMVQLDRYSVSDMINRGGTFLGSARFPEFREEHIRAVAIENMKKRGLDALVVIGGDGSYMGAMRLTEMGFPCIGLPGTIDNDIKGTDYTIGFFTALSTVVEAIDRLRDTSSSHQRISVVEVMGRYCGDLTLAAAIAGGCEFIMVPEVEYTRDDLVAEIKAGIAKGKKHAIVAITEHMCDVDELASYIEKETGRETRATVLGHIQRGGSPVPYDRILASRMGAYAIELLLQGHGGRCVGIQNEKLVHHDIIDAIENMKRPFKNDWLDCAKKLY

SEQ ID NO: 11722 - protein, 254 aa, Klebsiella pneumoniae
MRLNAIRHRGNSRTIDNQAQDYNMAATFPGVCAVVPAAGFGRRMQTECPKQYLSIGNKTILEHAVAALLADARVQRVVIAVSPGDRRFSQLPLAQHPQITVVDGGAERADSVLAGLQALPEAQWVLVHDAARPCLHQDDLSRLLSLCETSRVGGILAAPVRDTMKRAEPGKTAIAHTVDRNDLWHALTPQLFPRELLVDCLTRALNEGATITDEASALEYCGFHPQLVAGRADNIKVTRPEDLALAEFYLTRSL

SEQ ID NO: 11723 - protein, 598 aa, Klebsiella pneumoniae
MIVFSSLQIRRGVRVLLDNATATINPGQKVGLVGKNGCGKSTLLSLLKNEISADGGSMTYPGNWQLAWVNQETPALPQPAIDYVIDGDREYRQLEAALQQANERNDGHAIATVHGKLDAIDAWTIRSRAASLLHGLGFSNEQLERPVSDFSGGWRMRLNLAQALICRSDLLLLDEPTNHLDLDAVIWLEKWLKGYTGTLILISHDRDFLDPIVDKIIHIEQQTMFEYTGNYSSFEVQRATRLAQQQAMYESQQQRVAHLQSYIDRFRAKATKAKQAQSRIKMLERMELIAPAHVDNPFHFSFRQPESLPNPLLKMEKVSAGYGERIILDSIKLNLVPGSRIGLLGRNGAGKSTLIKLLAGELQPVSGEIGLAKGIKLGYFAQHQLEFLRADESPLQHLARLAPQELEQKLRDYLGGFGFQGDKVSEETRRFSGGEKARLVLALIVWQRPNLLLLDEPTNHLDLDMRQALTEALIDFEGALVVVSHDRHLIRSTTDDLYLVHDGKVEPFDGDLEDYQQWLSDSQKQESQSGEAPKESGNSAQARKDQKRREADCAARPNRCAKRSPVWKKRWTSSTRSWPVRKKNLATVSFMTPHVKPS

SEQ ID NO: 11724 - protein, 395 aa, Klebsiella pneumoniae
MFSHLDCLDAYFPAGDELEPNEAGLQFYDDLFDECLKHGIEPVITLSHFEMPYHLVTEYGGWRNRKLIDFFVRFARVVFTRYQHKVKYWMTFNEINNQANFHEDFAPFTNSGLKYLPDEDREPVMYQAAHYELVASALAVKAAREINPALQIGCMIAMCPIYPLTCAPDDMMMAMNAMHRRYWFTDVHVRGRYPQHLLNYFARRGFTLDITEADRQALTEGCVDYIGFSYYMSFATKATEDNPLLDYDETTSLVSNPYVKKSDWGWQIDPVGLRYSLNWFWDHYQLPLFIVENGFGAIDVREADGSVNDQYRIDYLSAHIAEMKKAVVEDGVDLMGYTPWGCIDLVSAGTGEMKKRYGFIYVDKDNEGNGTLARSRKKSFAWYQQVIASNGENLS

SEQ ID NO: 11725 - protein, 258 aa, Klebsiella pneumoniae
MSETVIALNGLSRRFPGMDRPAVAPLTCTIRAGYVTGLVGPDGAGKTTLMRMLAGLLKPDEGRASVIGFDPLKDDSALHAVLGYMPQKFGLYEDLTVMENLTLYADLRSVTGEARKKIFDRLLEFTSLGPFTERLAGKLSGGMKQKLGLACTLVGDPKVLLLDEPGVGVDPISRRELWQMVHELAGDGMLILWSTSYLDEAEQCRDVLLMNEGKLLYQGEPTALTQTMAGRTFWFPAPQENNRRLLQRALKLPQLATG

SEQ ID NO: 11726 - protein, 341 aa, Klebsiella pneumoniae
MMPRSLSQTGPEKRRFTWPKGTPQIIALLLVLLVDSLVAPHFYQVVLQDGRLFGSPIDILNRAAPVALLAIGMTLVIATSGIDLSVGAVMAIAGATAASMTVAGHSLPVVLLAALAAGALAGLWNGILVAVLKIQPFVATLILMVAGRGVAQLITAGQIVTFDSPALAWLGSGSFLLFPTPVIVAAATLLLFWLFTRKTALGMFIEAVGINIRAAKNAGVNTRIVVMLAYVLSGVCTAIAGIIVAADIRGADANNAGLWLELDAILAVVIGGASLMGGRFNLLLSVVGALIIQGMNTGILLSGFPPELNQVVKAVVVLCVLIVQSPRFIGLLKGVRGHDKA

SEQ ID NO: 11727 - protein, 532 aa, Klebsiella pneumoniae
  VARIANT (1)...(532): Xaa = Any Amino Acid
MIENLRNIAIIAHVDHGKTTLVDKLLQQSGTFDARTEAQERVMDSNDLEKERGITILAKNTAIKWNDYRINIVDTPGHADFGGEVERVMSMVDSVLLVVDAFDGPMPQTRFVTKKAFAHGLKPIVVINKVDRPGARPDWVVDQVFDLFVNLDATDEQLDFPIVYASALNGIAGLDHEDMADDMTPLYQAIVDRVPAPDVDLDGPLQMQISQLDYNNYVGVIGIGRIKRGKVKPNQQVTIIDSEGKTRNGKVGKVLTHLGLERIESDVAEAGDIIAITGLGELNISDTICDPQNVEALPALSVDEPTVSMFFNVNTSPFCGKEGKFVTSRQILDRLNKELVHNVALRVEETEDADAFRVSGRGELHLSVLIENMRREGFEMAVSRPKVIFREIDGRKQEPFENVTLDVEEQHQGSVMQALGERKGDLKNMNPDGKGRVRLDYVIPSRGLIGFRSEFMTMTSGTGLLYSTFSHYDDVRPGEVGQRNNGVLISNGQGKAVXSRCSVCRIAVSCSSATALKFTKARSSVFTAVPTT

SEQ ID NO: 11728 - protein, 255 aa, Klebsiella pneumoniae
MRHPLVMGNWKLNGSRHMVNELVANLRTELAGVSGCAVAIAPPEMYLDLAKRAAEGSHIHLGAQNVDVNLSGAFTGETSAEMLKDIGAQYIIIGHSERRTYHKESDELIAKKFAVLKEQGLTPVLCIGETEAENEAGKTEEVCARQIDAVLKTQGAAAFEGVVIAYEPVWAIGTGKSATPAQAQAVHKFIRDHIAKADAKIAEQVIIQYGGSVNAGNAAELFTQPDIDGALVGGASLKADAFAVIVKAAEAAKKA

SEQ ID NO: 11729 - protein, 276 aa, Klebsiella pneumoniae
MGLIATPIRHSMSPTMHNEAFAHLGLDYVYLAFEVGNQELKDVVQGFRAMKLRGFNVSMPNKTEICQYLDKLSPAAQLVGAVNTVVNDDGVLTGHITDGTGYMRALSEAGIDIIGKKMTVLGAGGAATALCVQAALDGVKAISIFNRRDKFFANAEETVAKIRHNTDCEIHLFDLDDHDKLRAEIDSSVILTNATGVGMKPFEGQMLLPDDSFLRPDLIVSDVVYNPRKTHLLEVAEKKGCRTLNGLGMMLWQGARAFEIWTGKQMPVDYIKSILF

SEQ ID NO: 11730 - protein, 302 aa, Klebsiella pneumoniae
MATRIEFSKHGGPEVLQAVEFTPRDPAEHEIQVENKAIGINYIDTYVRSGLYPPPSLPSGLGTEAAGIVSKVGHGVTHIKVGDRVVCAQSALGAYSTVHNVLADKAAVLPDAISFEQAAASFLKGLTVWYLLRKTYEIKPDEMFLFHAAAGGVGLIACQWAKALGAKLIGTVGSSQKAQRAKEAGAWQVINYREESIVERLKALTDGKKVAVVYDSVGKDTWEASLDCLQRRGLMVSFGNSSGPVTGVNLGILNQKGSLYVTRPSLQGYITNRKELEEACSELFSLIASGVIKVDVAESQIY

SEQ ID NO: 11731 - protein, 376 aa, Klebsiella pneumoniae
  VARIANT (1)...(376): Xaa = Any Amino Acid
MAGNKPFNKPQTETRERDPQLAGLKVPPHSIEAEQSVLGGLMLDNERWDDVAERVVADDFYTRPHRHIFTEMARLQESGSPIDLITLAESLERQGQLDSVGGFAYLAELSKNTPSAANISAYADIVRERAVVREMISVANEIAEAGFDPQGRTSEDLLDLAESRVFKIAESRANKDEGPKNIADVLDATVARIEQLFQQPHDGVTGVNTGYDDLNKKTAGLQPSDLIIVAARPSMGKTTFAMNLVENAAMLQDKPVLIFSLEMPSEQIMMRSLASLSRVDQTRIRTGQLDDEDWARISGTMGILLEKRNIYIDDSSGLTPTEVRSRARRIAREHGGIGLIMIDYLQLMRVPSLSDNRTLEIAEIXRSLKALAKELL

SEQ ID NO: 11732 - protein, 279 aa, Klebsiella pneumoniae
MARRCRWRLIRCRSLLSPWWRWCWPCCLRCTLPGALPPPNPLRLYVMNKILLQCDNLCKRYQEGNVQTDVLHNVSFSIGEGEMMAIVGTSGSGKSTLLHLLGGLDTPTSGDVIFSGQPMSKLSTAARADLRNRELGFIYQFHHLLPDFSALENVAMPLLIGKKKPADIERQAKAMLQAVGLEHRSHHRPSELSGGERQRVAIARALVNKPRLVLADEPTGNLDARNADSIFQLLGELNVAQRTAFLVVTHDLQLAKRMSRQLEMRDGRLTADLTLMGAE

SEQ ID NO: 11733 - protein, 300 aa, Klebsiella pneumoniae
MSEKLQKVLARAGHGSRREIEAKIEAGRVSVDGKIATLGDRVEIVPGLKIRIDGHLISVKESAEQICRVLAYYKPEGELCTRNDPEGRPTVFDRLPKLRGARWIAVGRLDVNTCGLLLFTTDGELANRLMHPSREVEREYAVRVFGQVDDDKLRQLSRGVQLEDGPAAFKTIKFTGGEGINQWYNVTLTEGRNREVRRLWEAVGVQVSRLIRVRYGDILLPKGLPRGGYTELDLAQTNYLRELVELTPETSSKVAVEKDRRRLKANQIRRAVKRHSQTSANPRQGNNSNRRSSTRNKTNG

SEQ ID NO: 11734 - protein, 273 aa, Klebsiella pneumoniae
MNNRVHQGHLARKRFGQNFLNDQFVIDSIVSAINPQKGQAMVEIGPGLAALTEPVGERLDQLTVIELDRDLAARLQTHPFLGPKLTIYQQDAMTMNFGELAEKMGQPLRVFGNLPYNISTPLMFHLFSYTDAIADMHFMLQKEVVNRLVAGPNSKAYGRLSVMAQYYCQVIPVLEVPPSAFTPPPKVDSAVVRLVPHSTMPYPVKEIRVLSRITTEAFNQRRKTIRNSLGNLFSVEVLTELGIDPAMRAENISVAQYCLMANWLSDNLPTKES

SEQ ID NO: 11735 - protein, 555 aa, Klebsiella pneumoniae
MAQFVYTMHRVGKVVPPKRHILKNISLSFFPGAKIGVLGLNGAGKSTLLRIMAGIDTEIEGEARPQPGIKIGYLPQEPQLNPEHTVRESVEEAVAEVVNALKGLDEVYAKYAEPDADFDNLAAQQGKFEEIIQAHDGHNLNVQLERAADALRLPDWDAKIANLSGGERRRVALCRLLLEKPDMLLLDEPTNHLDAESVAWLERFLHDFEGTVVAITHDRYFLDNVAGWILELDRGEGIPWEGNYSSWLEQKDQRLAQEASQEAARRKSIEKELEWVRQGAKGRQSKGKARLARFEELNNVEYQKRNETNELFIPPGPRLGDKVLEVSHLRKSYGDRVLIDDLSFSVPKGAIVGIIGPNGAGKSTLFRMMSGQEQPDSGTITLGETVKLASVDQFRDAMDNSKTVWEEVSGGLDIMKIGNTEMPSRAYVGRFNFKGVDQGKRVGELSGGERGRLHLAKLLQVGGNVLLLDEPTNDLDIETLRALENALLEFPGCAMVISHDRWFLDRIATHILDYQDEGKVEFFEGNFTEYEEYKKRTLGADALEPKRIKYKRIAK

SEQ ID NO: 11736 - protein, 341 aa, Klebsiella pneumoniae
MAVSKLMRNQDLILAASKCQVVTRFRNTIGLPGHLSVRLQPNHPTDDLKGIAASMLDGLLYGAGDAVIGINPASDSLPVLAQLNVMLDDIIQRFAIPTQSCILTHVTNTLQLIERGAPVDLVFQSVAGTEAANSGFGINLAMLQEAREAALSLRRGTLGSNVMYFETGQGSCLSANAHHGVDQQTCEARAYAVARHFEPLLVNTVVGFIGPEYLYDGKQIIRAGLEDHFCGKLMGLPIGCDVCYTNHAEADQDDMDTLLTLLCAAGLTFLIGVPGADDIMLNYQSTSFHDALYARRLLGLKHAPEFADWLAKMQIIDPHGALRLTDARHPLLSVLPQGASV

SEQ ID NO: 11737 - protein, 61 aa, Klebsiella pneumoniae
MILDAFSLQGKVAVVSGCDTGLGQGMALGLAEASCDIVGINIVEPVETIERVTGWDAVFSA

SEQ ID NO: 11738 - protein, 236 aa, Klebsiella pneumoniae
MRYRFRSGDGPRAGGSELRYCRYQYRRTGGDYRAGNRLGRRFLSLTADLRQIDGIPQLLERAVAEFGHIDILVNNAGLIRREDALAFSEKDWDDVMNLNIKSVFFMSQAAAKHFIAQGSGGKIINIASMLSFQGGIRVPSYTASKSAVMGVTRLLANEWAKHNINVNAIAPGYMATNNTQQLRADEQRSSEILDRIPAGRWGLPADLMGPVVFLASSASDYINGYTVAVDGGWLAR

SEQ ID NO: 11739 - protein, 250 aa, Klebsiella pneumoniae
MQFTLQHAIQGLENLALIPGCAGSSPIQNIGAYGVELQRVCEYVDCIELETGRKQRLSAAECRFGYRDSIFKHEYQDRYAIVAIGLSLAKTWQPVLSYGDLTRLDPQTVTPQQVFDAVCHMRMTKLPDPKINGNAGSFFKNPIVSAQVAEALLAQFPHAPHYPQANGSVKLAAGWLIDQCELKGQRIGGAAVHRQQALVLINEDRATSEDVVKLAHYVRQRVGAKFDVWLQPEVRFIGTHGEVNAEESIA

SEQ ID NO: 11740 - protein, 253 aa, Klebsiella pneumoniae
MFGQPLLVRTVPPRPTEQGQKLLALLRQVELLEEEWLGDEQTGSTPLLLSLAVNADSLATWLLPALANVLSDSPIRLNLQVEDETRTQERLRRGEVVGAVSIQPQALPSCLVDQLGALDYLFVASKEFAQRYFPNGVTRSALLKAPVVAFDHLDDMHQAFLQQNFDLPPGSVPCHIVNSSEAFVQLARQGTTCCMIPHLQIEKELNSGELIDLTPGLFQRRMLYWHRFAPESRMMRRVTDALIDYGHKVLRQD

SEQ ID NO: 11741 - protein, 525 aa, Klebsiella pneumoniae
  VARIANT (1)...(525): Xaa = Any Amino Acid
MTENIHKHRILILDFGSQYTQLVARRVRELGVYCELWAWDVTEAQIREFNPSGIILSGGPESTTEENSPRAPQYVFEAGVPVFGVCYGMQTMAMQLGGHVEGSNEREFGYAQVEVVNDSALVRGIEDSLTADGKPLLDVWMSHGDKVTAIPADFVTVASTDNCPFAIMANEEKRFYGVQFHPEVTHTRQGMRMLERFVRDICQCEALWTPAKIIDDAVERIRQQVGDDKVILGLSGGVDSSVTAMLLHRAIGKNLTCVFVDNGLLRLNEAQQVMEMFGDHFGLNIVHVEGEQRFLDALAGEIDPEAKXKIIGRVFVEVFDEEALKLDDVKWLAQGTIYPDVIESAASATGKAHVIKSHHNVGGLPKEMKMGLVEPLRELFKDEVRKIGLELGLPYDMLYRHPFPGPGLGVRVLGEVKKEYCDLLRRADAIFIEELHKADLYNKVSQAFTVFLPVRSVGVMGDGRKYDWVVSLRAVETIDFMTAHWAHLPYDFLGRVSNRIINEVNGISRVVYDISGKPPATIEWE

SEQ ID NO: 11742 - protein, 173 aa, Klebsiella pneumoniae
MVEQNGEDLIMRRILSVLLENESGALSRVIGLFSQRGYNIESLTVAPTDDPTLSRMTIQTVGDEKAIEQIEKQLHKLVDVLRVSELGQGAHVEREIMLVKVQASGYGREEVKRNTEIFRGQIIDVTPSIYTVQLAGTSDKLDAFLASLRDVARIVEVARSGVVGLSRGDKIMR

SEQ ID NO: 11743 - protein, 340 aa, Klebsiella pneumoniae
MGWRPDLSDVKPTGKTVAIIGAGPAGFAYADVLTRNGVKAVVFDRHPEIGGLLTFGIPAFKLEKEVMTRRREIFTGMGIEFKLNTEVGRDVQLDDLLKEYDAVFLGVGTYQSMRGGLDNEDAPGVYDALPFLIANTKQIMGFGETADEPYVSMEGKRVVVLGGGDTAMDCVRTSVRQNAAHVICAYRRDEENMPGSKREVKNAREEGVEFQFNVQPLGVEVNANGKVCGVKMARTEMGQPDAKGRRRAEIVPGSEHVVPADAVVMAFGFRPHSMEWLAKHSVELDSQGRIIAPEGSENAFQTSNPKIFAGGDIVRGSDLVVTAIAEGRKAADGILNYLEV

SEQ ID NO: 11744 - protein, 106 aa, Klebsiella pneumoniae
MIPGEYHVKPGQIALNTGRATCRVVVENHGDRPIQVGSHYHFAEVNPALKFDRQQAAGYRLNIPAGTAVRFEPGQKREVELVAFAGHRAVFGFRGEVMGPLEVNDE

SEQ ID NO: 11745 - protein, 100 aa, Klebsiella pneumoniae
MELTPREKDKLLLFTAALVAERRLARGLKLNYPESVALISAFIMEGARDGKSVASLMEEGRHVLTREQVMEGVPEMIPDIQVEATFPDGSKLVTVHNPII

SEQ ID NO: 11746 - protein, 560 aa, Klebsiella pneumoniae
MVLKDWRPYTHVMLASLAINILALAGILFSMQVYDRVIPAQSYPTLYVLFSGVLIAAVFNFVLKITRGHVTDLLGKRGDIRISDRVFGHALRLKNTAVPRSTGSFISQIRELEQVREMMTSTMMTVIADLPFFLLFQLVLFIVSPWLSWIAPVATILMLLPGLLLQKKLAELANKNQHESTLRNAILVESIQGLPDIKMMQAESRFLQQWNSYVAITAESGVQTRKVTHGLVSWGMSIQNLLYATVVAVGAPLVINGDITTGAMVAASMLSSRMVAPMTALCGVLARWQQVKVAKASLDNLMALPVEGGLDEPRIHRAVLHGNYEFRNAEFRYGKDNGPAPLRIKQLSIKAGEKIAVLGRIGAGKSTLLQAMMGNVEMTSGELRLDDLSLPQIDLADIRRNATLLTQQARLFHGTLRENVTLGRPMASDDELVKVLELCGALEFVNKLPMGLEHLVMEGGLGLSGGQRQSLLLARALIRDPNIILLDEPTSFFDERTEKAFVEQLARWAGERTLIIATHKAAVLNIVDRILVIQDGQLALDKPKATVFEQEKARAQVVNI

SEQ ID NO: 11747 - protein, 447 aa, Klebsiella pneumoniae
MSSTLVEALAKADINSDQIAAIGITNQRETVVVWERETGKPIYNAIVWQCRRTAEICEQLKRDGMEEYIRKATGLVVDPYFSGTKVKWILDHVEGSRERAKRGELLFGTVDTWLIWKMTQGRVHVTDYTNASRTMLFNIHDLDWDDKMLDALDIPRAMLPEVRKSSEVYGQTNIGGKGGTRIPIAGIAGDQQAALFGQLCVKEGMAKNTYGTGCFMLMNTGEKAVTSTHGLLTTIACGPRGEVNYALEGAVFMAGASIQWLRDEMKLISDAFDSEYFATKVKDTNGVYVVPAFTGLGAPYWDPYARGAIFGLTRGVNSNHIIRATLESIAFQTRDVLEAMQADSGIRLHALRVDGGAVANNFLMQFQSDILGTRVERPEVREVTALGAAYLAGLAVGFWQNLDELQEKAVIEREFRPGIETTERNYRYSGWKKAVKRALAWEEHDEA

SEQ ID NO: 11748 - protein, 220 aa, Klebsiella pneumoniae
MTHPTVIKLHDGNLMPQLGLGVWKAGNEEVVSAIHKALEVGYRSFDTAAAYQNETGVGNALHSAGVNRDELFITTKLWNDDQKRPHEALKESLSKLKLDYVDLYLIHWPVPAIGHYVEAWQALIELQQQGLTKSIGVCNFQVPHLQKLIDETGVAPVINQIELHPLMQQRQLHAWNATHKIQTESWSPLAQGGEGVFDQKVIHQLADKYGKTPAQIVIRC

SEQ ID NO: 11749 - protein, 634 aa, Klebsiella pneumoniae
MGRHAPSHLINTDGSKKSMPKYRSATTTHGRNMAGARALWRATGMTDADFGKPIIAVVNSFTQFVPGHVHLRDLGKLVAEQIEAAGGVAKEFNTIAVDDGIAMGHGGMLYSLPSRELIADSVEYMVNAHCADAMVCISNCDKITPGMLMASLRLNIPVIFVSGGPMEAGKTKLSDKIIKLDLVDAMIQGADPKVSDEQSNQVERSACPTCGSCSGMFTANSMNCLTEALGLSQPGNGSLLATHADRKELFLNAGKRIVELTKRYYEQDDASALPRNIASKAAFENAMTLDIAMGGSTNTVLHLLAAAQEAEIDFTMSDIDKLSRKVPQLCKVAPSTQKYHMEDVHRAGGVLGILGELDRAGLLNREVKNVLGLTLPQTLEQYDVMVTQDDAVKKMFRAGPAGIRTTQAFSQDCRWDTLDDDRAEGCIRSLEHAYSKDGGLAVLYGNFAENGCIVKTAGVDDSILKFTGPAKVYESQDDAVEAILGGKVVEGDVVVIRYEGPKGGPGMQEMLYPTSFLKSMGLGKACALITDGRFSGGTSGLSIGHVSPEAASGGNIALIEDGDMIAIDIPNRSIQLQLSDAEIAARREAQEARGDQAWTPKNRQRQVSFALRAYASLATSADKGAVRDKSKLGG

SEQ ID NO: 11750 - protein, 338 aa, Klebsiella pneumoniae
MRLVRRIERFQPAPGGATIAPLFFPGNDMRVLLAPMEGVLDSLVRELLTEVNDYDLCITEFLRVVDQLLPVKSFYRLCPELHHQSRTPSGTRVRVQLLGQYPEWLAENAARAVALGSWGVDLNCGCPSKLVNGSGGGATLLKDPELIYRGAKAMREAVPEHLPVTVKVRLGWDSGERRFEIADAVQQAGASELVVHGRTKEDGYKAERINWQAIGEIRQRLTIPVVANGEIWDWQSAQDCMAVTGCDSVMIGRGALNVPNLSRVIKYNEPRMPWPQVVQLLQKYTRLEKQGGTGLYHVARIKQWLGYLRKEYAEALTLFNEIRALQTSAEIAAAIGRY

SEQ ID NO: 11751 - protein, 655 aa, Klebsiella pneumoniae
MGTYTIAPRHLRFAIKLACAVVLALFVGFHFQLETPRWAVLTAAIVAAGPAFAAGGEPYSGAIRYRGMLRIAGTFIGCIAALVIIILMIRAPLLMMLVCCLWAGFCTWVSSLVKVENSYAWGLAGYTALIIIITIHTNPMLAPQFAVERCSEIVIGIVSAIVADLLFSPRSIKKEIDLELDNLLIAQYKLMQLCVAHGEKEEVDQAWGALVRRTTALEGMRSNLIMESSRWAKANQRLKAINTLSLTLITQACETYLIQNSRPEMVTDDYRELFAEPVETVQDVHQQLKRMRRFLTWKGEHNTPVTIYSWVGAATRYLLLKRGVVGNTKISRIEDGVLRGETVVKVESAERHHAMVNFWRTSVSCILGTLFWLWTGWTSGSGAMVMIAVVTALAMRLPNPRMVAIDFLYGTLAALPLGTLYFLVIMPATQQSMLLLCISLAAMAFFIGIEVQKRRLGSLGALASTINILVLDNPMQFQFSQFLDSALGQIVGCFLALMVILIVRDNSRARTGRVLLNQFVSAAVSSLTTNSARRKENHLPALYQQLFLLLNKFPGDVARFRLALTLIIAHQRLRDAPVPVNDDLSAFHRQLRRTADHVISAGSDDKRRRYFTQLLAELDVYQEKLRVWEASPQVTEPVRRLVEMLHKYQHVLTSS

SEQ ID NO: 11752 - protein, 156 aa, Klebsiella pneumoniae
MGAGGQVIFNGSITDSSCNVDSSSNGQKVDLGKWASNYFTGTGFETTKTPFHIKVKDCPASVTTVAVLFDGARDQSDNSLLAINGGASGVAIKLYEHDRSTAVSLGKTSAKQTVTPGTSGGTGSADLEFYADYISTAATVTAGKADGTANFNMIYN

SEQ ID NO: 11753 - protein, 585 aa, Klebsiella pneumoniae
MIMAMVQDIRVILIKLADRTHNMRTLGSLRPDKRRRIARETLEIYSPLAHRLGIHHIKTELEELGFEALYPNRYRVIKEVVKAARGNRKEMIQKILSEIEGRLQEAGIPCRVSGREKHLYSIYCKMVLKEQRFHSIMDIYAFRVIVHDADICYRVLGQMHSLYKPRPGRFKDYIAIPKANGYQSLHTSMIGPHGVPVEVQIRTEDMDQMAEMGVAAHWAYKEHGGESSTTAQIRAQRWMQSLLELQQSAGSSFEFIESVKSDLFPDEIYVFTPEGRIVELPAGATPVDFAYAVHTDIGHACVGARVDRQPYPLSQPLSSGQTVEIITAPGARPNAAWLNFVVSSKARAKIRQLLKNLKRDDSVSLGRRLLNHALGGSRKLAEIPPENIQRELDRMKLASLDDLLAEIGLGNAMSVVVAKNLQQGEAAAAPVPANASNHGHLPIKGADGVLITFAKCCRPIPGDPIIAHVSPGKGLVIHHESCRNIRGYQKEPEKFMAVEWDKETAQEFITEIKVDMFNHQGALANLTAAINTASSNIQSLNTEEKDGRVYSAFIRLTARDRVHLANIMRKIRVMPDVIKVTRNRN

SEQ ID NO: 11754 - protein, 89 aa, Klebsiella pneumoniae
MSLSVEAKAKIVSEFGRGENDSGSTEVQVALLTAQINHLQGHFAEHKKDHHSRRGLLRMVSQRRKLLDYLKRKDVARYSALIERLGLRR

SEQ ID NO: 11755 - protein, 613 aa, Klebsiella pneumoniae
MTLETGMMARQATAAVMVSMDDTAVFVTVVGQKKAKPGQDFFPLTVNYQERTYAAGKIPGGFFRREGRPSEGETLIARLIDRPVRPLFPEGFVNEVQVIATVVSVNPQVNPDIVAMIGASAALSLSGIPFNGPIGAARVGYINDQYVLNPTQEELKSSKLDLVVAGTEAAVLMVESEAELLSEDQMLGAVVFGHEQQQIVIQNINDLVKEAGKPRWDWQPEAVNEALNARVAALAESRLSDAYRITDKQERYAQVDVIKSETIATLVAEDETLDANELGEILHAIEKNVVRSRVLAGEPRIDGREKDMIRGLDVRTGVLPRTHGSALFTRGETQALVTATLGTARDAQNIDELMGERTDSFLFHYNFPQYSVGETGMVGSPKRREIGHGRLAKRGVLAVMPTIEEFPYTVRVVSEITESNGSSSMASVCGASLALMDAGVPVKAAVAGIAMGLVKEGDNFVVLSDILGDEDHLGDMDFKVAGSRDGISALQMDIKIEGITKEIMQVALNQAKGARLHILGVMEQAINAPRGDISEFAPRIHTIKINPDKIKDVIGKGGSVIRALTEETGTTIEIEDDGTVKIAATDGDKAHMLSVVSKRSPLRSKLAASTMVK

SEQ ID NO: 11756 - protein, 337 aa, Klebsiella pneumoniae
MPFDVIWMEVEMAKMRVGIVFTGKSAEHEVSLQSAKNIVEAIDKSRFDVVLLGIDKQGLWHINDAGNYLLNAQDPARIALRPSTVTLAQIPGREAQQLINAESGQPLAAIDVIFPIVHGTLGEDGSLQGMLRMANLPFVGSDVLGSAACMDKDVTKRLLRDAGLAVAPFITLTRANRAQFSFADVEAKLGLPLFVKPANQGSSVGVSKVKNEEQYHQAVALAFEFDHKVVVEQGIKGREIECAVLGNDHPQASTCGEIVLNSEFYAYDTKYIDDQGAQVVVPAAIAPELNDKIRAIAVQAYQTLGCSGMARVDVFLTADNEVVINEINTLPGFRNIS

SEQ ID NO: 11757 - protein, 506 aa, Klebsiella pneumoniae; identical to SEQ ID NO: 5045

SEQ ID NO: 11758 - protein, 609 aa, Klebsiella pneumoniae
MCGIVGAVAQRDIAEILLEGLRRLEYRGYDSAGLAVVDSEGHMTRVRRLGKVQMLAQAVEEQPLHGGTGIAHTRWATHGEPSESNAHPHVSEHIVVVHNGIIENHEPLRALLQSRGYVFVTETDTEVIAHLVHWELEQGGTLREAVLRAIPQLRGAYGTVIMDTRDPGTLLAARSGSPLVIGLGMGENFIASDQLALLPVTRRFIFLEEGDIAEVTRRSVVIFDKSAAQVKRQEIESNLQYDAGDKGIYRHYMQKEIFEQPNAIKNTLTGRISHGEVDLSELGPNANEMLAQVEHIQIVACGTSYNSGMVSRYWFEALAGVPCDVEIASEFRYRKSAVRRNSLMITLSQSGETADTLAALRLSKELGYLGSLAICNVPGSSLVRESDLALMTKAGTEIGVASTKAFTTQLTVLLMLVAKLARLKGQDASIEHDIVHGLQALPNRIEQMLSQDKRIEQLAERFSDKHHALFLGRGDQYPIAMEGALKLKEISYIHAEAYAAGELKHGPLALIDAEMPVIVVAPNNELLEKLKSNIEEVRARGGELYVFADGEAGFNGSDNMHIIEMPHVEETIAPIFYTVPLQLLAYHVALIKGTDVDQPRNLAKSVTVE

SEQ ID NO: 11759 - protein, 458 aa, Klebsiella pneumoniae
MSMSNSAMSVVILAAGKGTRMYSDLPKVLHTLAGKPMVQHVIDAANDLGACAVHLVYGHGGDLLRQTLHEDNLNWVLQAEQLGTGHAMQQAAPFFNDDEDILMLYGDVPLISVETLQRLRAAKPQGGIGLLTVKLDDPTGYGRITRENGQVTGIVEHKDASEAQRQIQEINTGILIAGGADLKRWLAKLTNNNAQGEYYITDIIAMAHQEGHQIVAVHPQRLSEVEGVNNRLQLARLERVYQAEQAEKLLLAGVMLRDPARFDLRGTLQHGRDVEIDTNVILEGNVVLGDRVKIGAGCVIKNSTIGDDCEISPYSVVEDAQLHAACTIGPFARLRPGAELLEGAHVGNFVEMKKARLGKGSKAGHLTYLGDAEIGDNVNIGAGTITCNYDGANKHKTIIGDDVFVGSDTQLVAPVTVGNGVTIAAGTTVTRNIADNELVLSRVPQVHKQGWQRPVKKK

SEQ ID NO: 11760 - protein, 577 aa, Klebsiella pneumoniae
MNHKDWDFVNRQLVAKMLAELEYEQVFHAESQGDGRYCINLPGAQWRFSAERGIWGWLWIDAQTLRCADEPVLAQTLLMQLKPVLSMSDATVAEHMQDLYATLLGDLQLLKARRGLSASDLIDLDADRLQCLLSGHPKFAFNKGRRGWGKEALERYAPEYANTFRLHWLAVKREHMVWRCDSELDIQQLLAAAMDPQEFARFNQVWQDNGLDNDWLPLPVHPWQWQQKISLDFIADLAEGRMVSLGEFGDLWLAQQSLRTLTNASRQGGLDIKLPLTIYNTSCYRGIPGKYIAAGPLASRWLQQVFATDATLKQSGAVILGEPAAGYVSHEGYAALAQAPYRYQEMLGVIWRENPCRWLKPDESPILMATLMECDENNQPLIGAYIDRSGLDAETWLTQLFRVVVVPLYHLLCRYGVALIAHGQNITLAMKKGVPQRVLLKDFQGDMRLVKDAFPEMDSLPQEVRDVTARLSADYLIHDLQTGHFVTVLRFVSPLMARLGVPERRFYQLLAAVLSDYMQEHPQMSARFALFSLFKPQIIRVVLNPVKLTWHDQDGGSRMLPNYLEDLQNPLWLATRD

SEQ ID NO: 11761 - protein, 331 aa, Klebsiella pneumoniae
MKCLAIADLFINAAMMESGLKALRDNGIEVEVREWSHDSVEKLQEDNLRVEQEGAEAVALPEALLQGTDDIDILITQFAPVNTAVFDKLPKLKYVGVLRGGVENVNLQVANARGVEVMNTPGRNARSVAEFTVGMILAEMRNIARSHDALRDKYWRKDSPNHQAIPELGGKVVGLVGLGHIAQLVAGFLSGFGTEIIFYDKYVAGHERYEKVDSLDELVQRADVISLHARLTPETENLINAHHFALMKRSAIIVNTARSGLINEKEMIDALRSGQIMGAALDTFDDEPLPDDSAFYTLNNVTITPHIAGSTIDAFSNSPKLFAEILLKKLS

SEQ ID NO: 11762 - protein, 180 aa, Klebsiella pneumoniae
MAARGVNKVILVGHLGQDPEVRYMPNGGAVANLTLATSETWRDKQTGEMRENTEWHRVVMFGKLAEVAGEYLRKGAQAYIEGQLRTRNWQDDAGVTRYVTEVLVGQNGTLQMLGGRRESGVPESAAQPQNPATPAQPAQAAAKSPKAKGGKKGRQDAAPSQQPPQPLPNDFPPMDDDAPF

SEQ ID NO: 11763 - protein, 87 aa, Klebsiella pneumoniae
MKAHIHPPYRTVVFHDTSANEYFKVGSTIRTDRVIELDGETFPYVTIDVSSKSHPYYTGKQKTFANEGSAARFRQRFGGFIDAKRKA

SEQ ID NO: 11764 - protein, 58 aa, Klebsiella pneumoniae
MKRLKYLSTLLVAAVALVSAWLLWNFYTQSPWTRDGKVRAEQVGITPQVSGSILQLNV

SEQ ID NO: 11765 - protein, 127 aa, Klebsiella pneumoniae
MLTPRRLDLADDGDTKSVSVIINNHNGLHVRPASKLVAALAGFNADLLLEKNGKCVKPDSLNQIALLQVRRNDKLRLLARGPDADAALAAFQALAADNFGESPAAQPAAAPATPSASKAMPCAIRWP

SEQ ID NO: 11766 - protein, 182 aa, Klebsiella pneumoniae
MTGSYPFVPPIPGNDLAGCFVYRTLDDLDRIAAHAAAAKSGVVIGGGLLGLEAANALKQLGLETQVVEFAPNLMAVQLDNGGAAMLREKIVALGVGVHTSKATTAIVREADGLRLNFADGGALRTDMVVFSAGIRPQDALARGCALQVGERGGIHIDGQCRTSDPDVLAIGEIALWDNKIYG

SEQ ID NO: 11767 - protein, 65 aa, Klebsiella pneumoniae
MIGGNWKQFKGKAKEQWGKLTDDDMTVIEGKRDQLVGKIQERYGYEKDQAEKEVSDWEHKNDYRW

SEQ ID NO: 11768 - protein, 185 aa, Klebsiella pneumoniae
MWHVCPISHYVTRSLEAALIVSLIASYLKRTQRGNWIGVMWIGVILAAALCLGLGIFINETTGEFPQREQELFEGIVAVIAVVILTWMVFWMRNVSRNVKQQLEQAVDKALQRGNHHGWALVMMVFFAVAREGLESVFFLLAAFQQDVGIWPPLGALLGLATAIVLGFLIYWGGIRLTWACSSNG

SEQ ID NO: 11769 - protein, 200 aa, Klebsiella pneumoniae
MYGNKTIAESLNVTIPDGHFTAIIGPNGCGKSTLLRTLSRLMTPASGHVWLDGAQIQQYASKDVARRIGLLAQNATTPGDITVQELVARGRYPHQPLFTRWRKEDEEAVNKAMRATGISDLALQSVDTLSGGQRHRAWIAMVLAQETAIMLLDEPTTWLDISHQIDLLELLSELNREKGYTLAAVLHDSNQACGYATHLI

SEQ ID NO: 11770 - protein, 193 aa, Klebsiella pneumoniae
MWNIANRFGSGVNGSFPGSPDTGPGLTAAGIDLIKQANALKMQMDVSHMNEKAFWDTAHHSTSPLVATHSNAHALCPQPRNLTDQQLRAIRDSGGVVGVNFGNAFLRADGRRDSDTPLTTIVRHIDYLINIMGEDHVALGSDFDGITLPDELGDVAGLPRLINTLRATGYDQLVLDKLLWRNWLRVLKNVWQQ

SEQ ID NO: 11771 - protein, 55 aa, Klebsiella pneumoniae
MPLVIHWPGTPAQEIATLTGNKDVMTTLMQRLLHVSTPANEYSQGEDLFSAARRA

SEQ ID NO: 11772 - protein, 514 aa, Pseudomonas aeruginosa
MSVELWQQCVDLLRDELPSQQFNTWIRPLQVEAEGDELRVYAPNRFVLDWVNEKYLGRLLELLGERGEGQLPALSLLIGSKRSRTPRAAIVPSQTHVAPPPPVAPPPAPVQPVSAAPVVVPREELPPVTTAPSVSSDPYEPEEPSIDPLAAAMPAGAAPAVRTERNVQVEGALKHTSYLNRTFTFENFVEGKSNQLARAAAWQVADNLKHGYNPLFLYGGVGLGKTHLMHAVGNHLLKKNPNAKVVYLHSERFVADMVKALQLNAINEFKRFYRSVDALLIDDIQFFARKERSQEEFFHTFNALLEGGQQVILTSDRYPKEIEGLEERLKSRFGWGLTVAVEPPELETRVAILMKKAEQAKIELPHDAAFFIAQRIRSNVRELEGALKRVIAHSHFMGRPITIELIRESLKDLLALQDKLVSIDNIQRTVAEYYKIKISDLLSKRRSRSVARPRQVAMALSKELTNHSLPEIGVAFGGRDHTTVLHACRKIAQLRESDADIREDYKNLLRTLTT

SEQ ID NO: 11773 - protein, 367 aa, Pseudomonas aeruginosa
MHFTIQREALLKPLQLVAGVVERRQTLPVLSNVLLVVEGQQLSLTGTDLEVELVGRVVLEDAAEPGEITVPARKLMDICKSLPNDVLIDIRVEEQKLLVKAGRSRFTLSTLPANDFPTVEEGPGSLNFSIAQSKLRRLIDRTSFAMAQQDVRYYLNGMLLEVNGGTLRSVATDGHRLAMCSLDAQIPSQDRHQVIVPRKGILELARLLTEQDGEVGIVLGQHHIRATTGEFTFTSKLVDGKFPDYERVLPRGGDKLVVGDRQQLREAFSRTAILSNEKYRGIRLQLSNGLLKIQANNPEQEEAEEEVQVEYNGGNLEIGFNVSYLLDVLGVIGTEQVRFILSDSNSSALVHEADNDDSAYVVMPMRL

SEQ ID NO: 11774 - protein, 806 aa, Pseudomonas aeruginosa
MSENNTYDSSSIKVLKGLDAVRKRPGMYIGDTDDGTGLHHMVFEVVDNSIDEALAGYCSEISITIHTDESITVRDNGRGIPVDIHKEEGVSAAEVIMTVLHAGGKFDDNTYKVSGGLHGVGVSVVNALSHELRLTIRRHNKVWEQVYHHGVPQFPLREVGETDGSGTEVHFKPSPETFSNIHFSWDILAKRIRELSFLNSGVGILLRDERTGKEELFKYEGGLKAFVEYLNTNKTAVNEVFHFNVQREEDGVGVEVALQWNDSFNENLLCFTNNIPQRDGGTHLAGFRSALTRNLNNYIEAEGLAKKFKIATTGDDAREGLTAIISVKVPDPKFSSQTKDKLVSSEVKTAVEQEMGKYFADFLLENPNEAKAVVGKMIDAARAREAARKAREMTRRKGALDIAGLPGKLADCQEKDPALSELYIVEGDSAGGSAKQGRNRRTQAILPLKGKILNVEKARFDKMLSSQEVGTLITALGCGIGREEYNIDKLRYHNIIIMTDADVDGSHIRTLLLTFFFRQMPELIERGYIYIAQPPLYKVKRGKQEQYIKDDQAMEEYMTQSALEDASLHVNEHAPGLSGAALEKLVNEYRGVIATLKRLSRLYPQELTEHFIYLPTVSVDDLANESAMQGWLEKFQARLTAAEKSGLTYKASLREDRERHLWLPEVELVAHGLSSYVTFNRDFFASNDYRSVSLLGDQLNSLLEDGAYVQKGERKRPISAFKDGLDWLMAEGTKRHSIQRYKGLGEMNPEQLWETTMDPNVRRMLKVTIEDAIAADQIFNTLMGDAVEPRRDFIESNALAVSNLDV

SEQ ID NO: 11775 - protein, 315 aa, Pseudomonas aeruginosa
MSQTTPAVRTFQDLILALQNYWAEQGCVVLQPYDMEVGAGTFHTATFLRAIGPETWNAAYVQPSRRPTDGRYGENPNRLQHYYQFQVVLKPNPENFQELYLGSLKAIGIDPLVHDIRFVEDNWESPTLGAWGLGWEIWLNGMEVTQFTYFQQVGGIECYPVTGEITYGLERLAMYLQGVDSVYDLVWTDGPFGKVTYGDVFHQNEVEQSTFNFEHANVPKLFELFDFYESEANRLIALELPLPTYEMVLKASHTFNLLDARRAISVTERQRYILRVRTLARAVAQSYLQARARLGFPMATPELRDEVLAKLKEAE

SEQ ID NO: 11776 - protein, 187 aa, Pseudomonas aeruginosa
MSLINTQVQPFKVNAFHNGKFIEVTEESLKGKWSVLIFMPAAFTFNCPTEIEDAANNYGEFQKAGAEVYIVTTDTHFSHKVWHETSPAVGKAQFPLIGDPTHQLTNAFGVHIPEEGLALRGTFVINPEGVIKTVEIHSNEIARDVGETVRKLKAAQYTAAHPGEVCPAKWKEGEKTLAPSLDLVGKI

SEQ ID NO: 11777 - protein, 498 aa, Pseudomonas aeruginosa
MQIGVPLETHAGETRVSATPETVKKLIGQGHQVIVQSGAGVSASQPDSAYEAAGATIGSAAEAFGADLVLKVVAPSAAELAQMKSGAVLVGMLNPFDNENIARMAERGITAFALEAAPRTSRAQSLDVLSSQANIAGYKAVMLAANHYPRFMPMLMTAAGTVKAARVLILGAGVAGLQAIATAKRLGAVIEASDVRPAVKEQIESLGAKFVDVPYETDEERECAEGVGGYARPMPASWMERQAKAVHERAKQSDIVITTALIPGRKAPTLLHEATVAEMKPGSVVIDLAAAQGGNCPLTEADQVVVRHGVTIVGHSNLAALVPADASALYARNILDFLKLTLNAEGFSVNLEDDIVAACLMCRDGQAVRKNGAAASGSFDNDKCARLAPAPRPVKTMDIISDGIYNLIIFVLAVYVGYHVVWNVTPALHTPLMAVTNAISAIVIVGAMLAAALTVTPLGKAMGTLAVALAAVNVFGGFLVTRRMLEMFKKKAPKAGGH

SEQ ID NO: 11778 - protein, 284 aa, Pseudomonas aeruginosa
MSAPRSVLAGLIGAGIQASRTPALHEREGDAQGIRYLYRLIDLDPLGKSADDLEFLLAAASDLGFTGLNVTFPCKQAIIPLLDDLSAEARGIGAVNTVVLRDGRRIGHNTDCLGFAEGFRRGLADAPRQRVVQMGAGGAGAAVAHALLAEGVERLVLFDVDPARAQALADNLNQHFGAPRALAGSDLAGALGDAQGLVNTTPVGMAKLPGMPVPAELLRADLWVAEVIYFPLETELLRQARALGCRTLDGGTMAVFQAVKAFELFSGVTADAARMQAHFASLGD

SEQ ID NO: 11779 - protein, 168 aa, Pseudomonas aeruginosa
MARPLAMIAALGENRAIGIDNRLPWRLPADLKHFKAMTLGKPVIMGRKTWDSLGRPLPGRLNLVVSRQAGLALEGAEVFASLDAALARAEAWAQAEDADELMLIGGAQLYAEALPRAARLYLTRVGLAPEGDAFFPEIDGAAWRLASSIEHAAADDAPAYAFEVWERR

SEQ ID NO: 11780 - protein, 398 aa, Pseudomonas aeruginosa
MTLPSLRLKANAERRLRAGHLWVYSNEVDVAATPLNAFAAGDQAVLEMANGKPLGIVALSPNNLICGRLISRDTKHVLDKSLLVHRINIALSLRERLFDKPFYRLVYGDSDLLPGLVVDRFGDVLVVQLASAAMELRKDEVLAALLQVLKPAAVLWKNDSSARDAEGLERYVANAYGEVPEWVALEENGVKFEAPVLAGQKTGWFYDHRMNRARLAPYVQGKRVLDLFSYIGGWGIQAAAFGASEVMCVDASAFALDGVERNAALNGVAEKVACVEGDVFEALRELKAADERFDVVIADPPAFIKRKKDLKNGEAAYRRLNEQAMRLLSKDGILVSASCSMHLPEDDLQNILIGSARHLDRNIQLLERGGQGPDHPVHLAIAETRYIKSLTCRLLPNG

SEQ ID NO: 11781 - protein, 455 aa, Pseudomonas aeruginosa
MFGSNDDKKAPQGGEKKGLFGWWRKKPQAGEQPADQPVEPVSETAAAEQRAPADDVAQSLTEQPGRQQPSAAEPAEPPAPVAEAPLAGDEPASAEEHSPRPEAPVAQPEPILAAEPEPEPEPEPEPEPEPVAPLAAAPAVSEPATRPGFFARLRQGLSKTSASIGEGMASLFLGRKEIDDDLLDDIETRLLTADVGVEATTLIVQNLTKRVARKELADSGALYKALQEELASLLRPVEQPLQVDVAREPYVILVVGVNGVGKTTTIGKLAKKLQLEGKKVMLAAGDTFRAAAVEQLQVWGERNRIPVIAQHTGADSASVIFDAVQAAKARGIDVLIADTAGRLHTKDNLMEELKKVRRVIGKLDETAPHEVLLVLDAGTGQNAINQAKQFNLAVELTGLALTKLDGTAKGGVIFALAKQFGLPIRYIGVGEGIDDLRTFEADAFVQALFAERENA

SEQ ID NO: 11782 - protein, 197 aa, Pseudomonas aeruginosa
MIKLEQLVLASHNAGKLKELQAMLGASVKVRSIGEFSQVEPEETGLSFVENAILKARNAARLSGLPALADDSGLAVDFLGGAPGIYSARYADGRGDAANNAKLLEAMKDVPDAERGAQFVSVLALVRHADDPLPILCEGIWEGRILREARGAHGFGYDPLFWVPERDCSSAELAPEEKNRLSHRARAMALLKQRLGL

SEQ ID NO: 11783 - protein, 230 aa, Pseudomonas aeruginosa
MSTIAENIAKVAARIREAAQAAGRDPATVGLLAVSKTKPAAAVREAHAAGLRDFGENYLQEALGKQAELADLPLNWHFIGPIQSNKTRPIAEHFQWVHSVDRLKIAQRLSEQRPAGLPPLNVCLQVNVSGEASKSGCAPEDLPALAEAVKQLPNLRLRGLMAIPEPTAERAAQHAAFARLRELLLDLNLGLDTLSMGMSDDLEAAIGEGATWVRIGTALFGARDYGAPAS

SEQ ID NO: 11784 - protein, 394 aa, Pseudomonas aeruginosa
MSQHDQHPDAPAQAFATRVIHAGQAPDPSTGAIMPPIYANSTYIQESPGVHKGLDYGRSHNPTRWALERCVADLEGGTQAFAFASGLAAISSVLELLDAGSHIVSGNDLYGGTFRLFERVRRRSAGHRFSFVDPTDLQAFEAALTPETRMVWVETPSNPLLRLTDLRAIAQLCRARGIISVADNTFASPYIQRPLELGFDVVVHSTTKYLNGHSDVIGGIAIVGDNPDLRERLGFLQNSVGAISGPFDAFLTLRGVKTLALRMERHCSNALALAQWLERQPQVARVYYPGLASHPQHELAKRQMRGFGGMISLDLRCDLAGARRFLENVRIFSLAESLGGVESLIEHPAIMTHASIPAETRADLGIGDSLIRLSVGVEALEDLQADLAQALAKI

SEQ ID NO: 11785 - protein, 144 aa, Pseudomonas aeruginosa
MASDKPLRLLLGFDYGTRQIGVAVGQAVTGQARELCVLKAQNGVPDWNRVEALIKEWQPDAIVVGLPLNMDGSPSEMSERAEKFGRRLNGRFNLPVFTHDERLTTYAAKGERLAQGQRDGYRERPVDALAAALLLEGWLAEHPD

SEQ ID NO: 11786 - protein, 467 aa, Pseudomonas aeruginosa
MGLNADWMQRDLNVLWHPCTQMKDHERLPVIPIRRGEGVWLEDFEGKRYIDAVSSWWVNVFGHANPRINQRIKDQVDQLEHVILAGFSHQPVIELSERLVKITPPGLDRVFYADSGSAGIEVALKMSYHFWLNSGRPRKKRFVTLTNSYHGETIAAMSVGDVALFTETYKSLLLDTIKVPSPDCFLRPDGMCWEEHSRNMFAHMERTLAEGHDEIAAVIVEPLIQGAGGMRMYHPVYLKLLREACDRYGVHLIHDEIAVGFGRTGTMFACEQAGIAPDFLCLSKALTGGYLPMSAVLTSETIYRGFYDDYQTLRAFLHSHTYTGNPLACAAALATLDIFEEDKVIEANRALSTHMARATAHLADHPHVAEVRQTGMVLAIEMVQDKASRTPYPWQERRGLKVFQHGLERGALLRPLGSVVYFLPPYVITPEQIDFLAEVASEGIDIATRDAVSVAVSDFHPDHRDPG

SEQ ID NO: 11787 - protein, 850 aa, Pseudomonas aeruginosa
MDIAEYFSKQTTEYLQRAAQVAAEFGKREVDTEHLLYALADADVVQAVLKQFGLSPADLKQYIEANAVRGASKGEASEDMTISPRVKSALQHAFALSRELGHSYVGPEHLLLGLAAVPDSFAGTLLKKYGLTEQALRQKAVKVVGKGAEDGRVDGPSNTPQLDKFSRDLTRLAREGKLDPVIGRSKEVETTIEVLARRKKNNPVLIGEPGVGKTAIVEGLAQRMVQGEVPEVLRDKRLVELNINAMVAGAKYRGEFEERLKQVMDELQAAQSEIILFIDEVHTIVGAGQGGGEGGLDVANVLKPAMARGEMNLIGATTLNEYQKYIEKDAALERRFQPVFVPEPTVEQTISILRGLRDKLEGHHKVTIRDEAFVAAAELSDRYIGNRFLPDKAIDLIDQAAARVRIASTSRPAEIQELEAELAQLKREQDYAASRKWYDEAKVFEKRIQERKEHLEQITERWQQTQGSKTEEVRVEDIAEIISKLTGIPVTELTAEEREKLLQMEERLHQRVIGQQEAITAVSDAVRLARAGLRQGSRPIATFLFLGPTGVGKTELAKALAEVVFGDEDAMIRIDMSEYMERHAVSRLIGAPPGYVGYDEGGQLTERVRRRPYSVILLDEIEKAHADVNNILLQVFDDGRLTDGKGRVVDFTNTIIIATSNLGSELIMKNAQAGEFAQPPEKLKRELMTTLRGHFRPEFLNRLDEVIVFESLSKAQIEDIVRLQLERVKRAAHAQDIYLHIDDSLVGHLAEEAYQPEFGARELKRQIRQQLETRLATAMLKGEVKEGETVTFFYDAKDGVGYRKGAAPNPAARKKSGAGETPRGRATAARKPAAKKGAAAKGKADKPKAK

SEQ ID NO: 11788 - protein, 352 aa, Pseudomonas aeruginosa
MSATASVATRHDWSLAEVRALFEQPFNDLLFQAQTVHRAHFDPNRVQVSTLLSIKTGACPEDCKYCPQSGHYNTGLDKEKLMEVQKVLEAAAEAKAIGSTRFCMGAAWKHPSAKDMPYVLEMVKGVKKLGLETCMTLGRLTQEQTQALADAGLDYYNHNLDTSPEFYGNIITTRTYSERLQTLAYVREAGMKICSGGILGMGESVDDRAGLLIQLANLPEHPESVPINMLVKVKGTPLAEEKDVDPFDFIRTLAVARIMMPKSHVRLSAGREQMNEQMQALAFMAGANSIFYGEKLLTTKNPQAEKDMQLFARLGIKPEEREEHADEVHQAAIEQALVEQRESKLFYNAASA

SEQ ID NO: 11789 - protein, 401 aa, Pseudomonas aeruginosa
MSFDLASRLASRRAEDLYRQRPLLESAQGPDVVVDGQPLLAFCSNDYLGLANHPEVIAALRAGAERWGVGGGASHLVVGHSGPHHELELALAEFTGRPRALLFSTGYMANLGAVAALVGKGDTVLEDRLNHASLLDAGLLSGARFSRYLHNDPASLAARLDKAEGNTLVVTDGVFSMDGNLADLPALAAVAQARGAWLMVDDAHGFGPLGASGGGIVEHFGLGQEQVPVLIGTLGKGFGTAGAFVAGSEELIETLIQYARPYIYTTSQPPAVACATLKSLELLRRESWRRQHLAALIARFRHGAEALGLTLMDSFTPIQPILVGGSRQAVALAGMLRARGIMVGAIRPPTVPANSARLRVTLSAAHSEAQVDRLLEALGESWRQLSSSLLAEIEAEEGDDA

SEQ ID NO: 11790 - protein, 322 aa, Pseudomonas aeruginosa
MRTLIRLVRTLILLLVLALLAGAWWWLQDEALRPPALAGHSEDSSLKVAGLRRHYLLYVPPGVSEGAPLLVVLHGSRGDGAQMRRISGYGFDRLAAQEGFLVAYPDGFEGHWNDCRKAASYSARLRDVDDVAFLRALVARLAQEYRVDSQRVYVAGYSNGGQMAFRLAAEAPGLPAAIAAVAASLPTTGNDACRPVERPTAALLINGTRDPINPYLGGKVSLFGFGDRGAVRSTLDSARWWAGLNGIAAPPDVAPLTRPGPVWTERQRWQEDGHPPVELLSVHGGGHVLAQPDYRFPRILGKSDPELDAPVEIWRFFSQLPR

SEQ ID NO: 11791 - protein, 396 aa, Pseudomonas aeruginosa
MSEYSVFTSESVSEGHPDKIADQISDAVLDAIIAKDKYARVACETLVKTGVAIIAGEVTTSAWVDLEELVRKVIIDIGYDSSDVGFDGATCGVLNIIGKQSVDINQGVDRAKPEDQGAGDQGLMFGYASNETDVLMPAPICFSHRLVERQAEARKSGLLPWLRPDAKSQVTCRYEGGKVVGIDAVVLSTQHNPEVSYNDLRDGVMELIIKQVLPAELLHKDTQFHINPTGNFVIGGPVGDCGLTGRKIIVDSYGGMARHGGGAFSGKDPSKVDRSAAYAGRYVAKNIVAAGLAERCEIQVSYAIGVAQPTSISINTFGTGKVSDEKIVQLVREHFDLRPYAITKMLDLLHPMYQPTAAYGHFGRHPFELTVDGDTFTAFTWEKTDKAALLRDAAGL

SEQ ID NO: 11792 - protein, 665 aa, Pseudomonas aeruginosa
MPSRRERANAIRALSMDAVQKANSGHPGAPMGMADIAEVLWRDYMQHNPSNPQWANRDRFVLSNGHGSMLIYSLLHLTGYDLGIEDLKNFRQLNSRTPGHPEYGYTAGVETTTGPLGQGIANAVGMALAEKVLAAQFNRDGHAVVDHYTYAFLGDGCMMEGISHEVASLAGTLRLNKLIAFYDDNGISIDGEVHGWFTDDTPKRFEAYGWQVIRNVDGHDADEIKTAIDTARKSDQPTLICCKTVIGFGSPNKQGKEECHGAPLGADEIAATRAALGWEHAPFEIPAQIYAEWDAKETGAAQEAEWNKRFAAYQAAHPELAAELLRRLKGELPADFAEKAAAYVADVANKGETIASRKASQNALNAFGPLLPELLGGSADLAGSNLTLWKGCKGVSADDAAGNYVFYGVREFGMSAIMNGVALHGGFIPYGATFLIFMEYARNAVRMSALMKQRVLYVFTHDSIGLGEDGPTHQPIEQLASLRLTPNLDTWRPADAVESAVAWKHAIERADGPSALIFSRQNLPHQARDVAQVADIARGGYVLKDCEGEPELILIATGSEVGLAVQAYDKLSEQGRKVRVVSMPCTSVYEQQDESYKQSVLPVEVGARIAIEAAHADYWYKYVGLDGRIIGMTSFGESAPAPALFEHFGFTLDNVLAVAEELLED

SEQ ID NO: 11793 - protein, 387 aa, Pseudomonas aeruginosa
MTVLKMTDLDLKGKRVLIREDLNVPVKDGQVQSDARIKAALPTLKLALEKGAAVMVCSHLGRPTEGEFSAENSLKPVAEYLSKALGREVPLLADYLDGVEVKAGDLVLFENVRFNKGEKKNADELAQKYAALCDVFVMDAFGTAHRAEGSTHGVARFAKVAAAGPLLAAELDALGKALGNPARPMAAIVAGSKVSTKLDVLNSLAGICDQLIVGGGIANTFLAAAGHKVGKSLYEADLVETAKAIAAKVKVPLPVDVVVAKEFAESAVATVKAIAEVADDDMILDIGPQTAAQFAELLKTSKTILWNGPVGVFEFDQFGEGTRTLANAIADSAAFSIAGGGDTLAAIDKYGIAERISYISTGGGAFLEFVEGKVLPAVEILEQRAKG

SEQ ID NO: 11794 - protein, 354 aa, Pseudomonas aeruginosa
MALISMRQMLDHAAEFGYGVPAFNVNNLEQMRAIMEAADKTDSPVIVQASAGARKYAGAPFLRHLILAAIEEFPHIPVVMHQDHGTSPDVCQRSIQLGFSSVMMDGSLREDGKTPADYDYNVRVTQQTVAFAHACGVSVEGELGCLGSLETGMAGEEDGVGAEGVLDHSQLLTDPEEAADFVKKTKVDALAIAIGTSHGAYKFTKPPTGDTLSIQRIKEIHARIPDTHLVMHGSSSVPQDWLAIINEYGGEIKETYGVPVEEIVEGIKYGVRKVNIDTDLRLASTGAIRRFLAQNPSEFDPRKYFSKTVEAMRDICIARYEAFGTAGNASKIKPISLEGMFQRYARGELDPKVN

SEQ ID NO: 11795 - protein, 392 aa, Pseudomonas aeruginosa
MASTDVLIVGAGAAGLMCAMTAAGRGRRVRVLDHANKAGKKILMSGGGRCNFTNLYTEPANFLSRNPHFCKSALARYTQWDFIGLVAKHQVPYHEKKLGQLFCDNKSSDILEMLLRECAEAGAEILLDTSIEEIARDDAGYRLRTSAGEMRCESLVIASGGLSIPTLGASGFGYQVARQFGHEVLPTRAGLVPFTITDQLKELCAELSGTSVDCRVSCNGQAFRENLLFTHRGLSGPAMLQISSYWQPGDTLEIDLLPDHDASEWLAQQQRERPNSELKTLLAELFTKKLAGLLADRWFVSKPMKQYTPTELAGIAGQLSAWRVTPSGTEGYRTAEVTLGGVSTDEVSSKTMESQRSPGLYFVGEVLDVSGHLGGFNFQWAWASGYAAGQYA

SEQ ID NO: 11796 - protein, 149 aa, Pseudomonas aeruginosa
MSEIKSRLLDAVKVAMRAQDKPRLTTLRLALADIKRVEVDERIEVDDARALLILDRMIKQRRDAQRQFSDAGRQDLAEVEAAEILVLQDFMPKPLDDHEIDALIERSIVDSGAQGPQDMGKAMNLLRPQVQGRVDMAQVSQRLKARLSS

SEQ ID NO: 11797 - protein, 71 aa, Pseudomonas aeruginosa
MPAVKVKENEPFDVALRRFKRSCEKAGVLAEVRSREFYEKPTAERKRKAAAAVKRHAKKVQREQRRRERLY

SEQ ID NO: 11798 - protein, 341 aa, Pseudomonas aeruginosa
MRVLGLETSCDETGVALYDSERGLLADALFSQIDLHRVYGGVVPELASRDHVKRMLPLIRQVLDESGCTPADIDAIAYTAGPGLVGALLVGASCAQAMAFAWGVPAVGVHHMEGHLLAPMLEEQPPRFPFVALLVSGGHTQLVRVDGIGRYQLLGESVDDAAGEAFDKTAKLIGLGYPGGPEIARLAERGTPGRFVFPRPMTDRPGLDFSFSGLKTFTLNTWQRCVEAGDDSEQTRCDIALAFQTAVVETLLIKCRRALKQTGLKNLVIAGGVSANQALRSGLEKMLGEMKGQVFYARPRFCTDNGAMIAYAGCQRLLAGQHDGPAISVQPRWPMESLPAV

SEQ ID NO: 11799 - protein, 189 aa, Pseudomonas aeruginosa
MVWLLAILAYLLGSLSFAVLLSRWFGTQDPRASGSGNPGATNMLRVAGKKLAILTLLGDVGKGLLPVLVARWLGLGVMEEAWVGIAAVIGHLYPLYFNFRGGKGVATAAGMLLGLYPPAVLLAAAAWLLTFKLSRTSSLASLVATPLTLPLLAWQQPGALLPMTVLTGLIVWRHRANLRDLFAGRERHF

SEQ ID NO: 11800 - protein, 268 aa, Pseudomonas aeruginosa
MSELYQHRARKRFGQNFLHDAGVIHRILRAIHAREGQRLLEIGPGQGALTEGLLGSGARLDVIELDQDLIPLLKLKFGLESRFSLHQGDALKFDFASLVESGEKLRVVGNLPYNISTPLIFHLLEHAPVIEDMHFMLQKEVVERLAATPGGGDWGRLSIMVQYHCRVEHLFNVGPGAFNPPPKVDSAIVRLTPFAEPPHPARDPKLLERVVREAFNQRRKTLRNTLKPLLSVEDIEAAEVDPTLRPEQLDLAAFVRLANQLAELPGNR

SEQ ID NO: 11801 - protein, 230 aa, Pseudomonas aeruginosa
MRLDRFLANLPELSRRDAQMLIAGGHLRVDGQVVRDGTHEVRVFSRVELDERLLQAGKPARYYMLHKPMGCVSATRDPQHPTVLDLFPEDLRDDLHIGGRLDYNTTGLMLLTNDGQWSRRLTLPGSRRDKVYYVETEAPIDQRYVDAFAAGLHFRFEDLVTLPAQLEPIGPRCARLTLHEGRYHQVKRMFGHFDNKVLRLHRERMGDICLDPQLPPGAWRPLNAEEICSV

SEQ ID NO: 11802 - protein, 305 aa, Pseudomonas aeruginosa
MTDMHDDIPAGSRCGYVAIVGRPNVGKSTLLNHILGQKLAITSRKPQTTRHNMLGIKTEGEVQAVYVDTPGLHKSGEKALNRYMNRTASAALKDVDVVIFVVDRTRWTEEDQMVLERVQYVSCPVLIAVNKTDRIEEKADLLPHLEWLTQQLPKAEVVPISAQHGTNLDVLEKLVAERLPESEHFFPEDQITDRSSRFLAAELVREKIMRQLGAELPYQITVEIEEFKQEGRILHIHALILVEREGQKKIIIGDKGERIKSIGQNARKDMEVLFDSKVMLNLWVKVKGGWSDDERALRSLGYGDL

SEQ ID NO: 11803 - protein, 375 aa, Pseudomonas aeruginosa
MAEAKVLSGAGLRGQVAGQTALSTVGQEGAGLTYRGYDVRDLAAAAIFEEVAYLLLYGELPNKQQLDAYLKKLQGQRDLPQALKEVLERIPKDAHPMDVMRTGASVLGTLEPELSFDQQRDVADRLLAAFPAIMTYWYRFTHEGQRIDCNSDEPTIGGHFLALLHGKKPSELHVKVMNVSLILYAEHEFNASTFTARVCASTLSDLYSCVTGAIGSLRGPLHGGANEAAMELIERFSSPQEATAELLKMLERKDKIMGFGHAIYKDSDPRNEVIKGWSKQLADEVGDKVLFAVSEAIDKTMWEQKKLFPNADFYHASAYHFMGIPTKLFTPIFVCSRTSGWTAHVFEQRANNRIIRPSAEYTGVEQRAFVPLEQR

SEQ ID NO: 11804 - protein, 438 aa, Pseudomonas aeruginosa
MSAKDTPAPQAAEPGRAQPVEVPGGGHWWRRLLAFAGPGYLVAVGYMDPGNWATDVAGGAQLGYLLLSVILLSSLMAMLLQALSARLGIASGLDLAQACRERYSPSTCRLLWLACETAIIACDLAEVIGTAIALKLLFGLPLAWGALLCVGDALLVLVLIGRGQRPLEAFVVALLTLIFACFAVQLLLSRPELGEVLQGFLPSPRVLSDPAALYLAIGIVGATVMPHNLYLHSSLVQSRAYPRSLAGKRKALRWAVADSSLALTLALLVNAAILIVAASVFHRNGHTEVVDIEQAHALLSPLLGLELASLLFAVALLASGLNSTVTTTLAGQIVMEGFLRLRLAPWARRLLTRGVAVLPVLLVTLLYGEDGTARLLIFSQVILSMQLPLAVIPLLQFVSDRRLMGPLAIGAGTRWLAWAVALAIVGLNLQLLADFAFG

SEQ ID NO: 11805 - protein, 704 aa, Pseudomonas aeruginosa
MHTFFIAPTGFGVGLTSISLGLLRALERAGLKVGFFKPIAQLHPGDLGPERSSELVARTHGLDTPKPLPLAQVERMLGDGQLDELLEEIISLYQRAAADKDVVIVEGMVPTRHASYAARVNFHLAKSLDAEVILVSAPENETLTELTDRIEIQAQLFGGPRDPKVLGVILNKVRGEADAANAEDGVADFARRLTEHSPLLRDDFRLIGCIPWQDELNAARTRDIADLLSARVINAGDYEQRRVQKIVLCARAVPNTVQLLKPGVLVVTPGDRDDIILAASLAAMNGVPLAGLLLCSDFPPDPRIMELCRGALQGGLPVLSVATGSYDTATNLNRMNKEIPVDDRERAERVTEFVAGHIDFEWLKQRCGTPRELRLSPPAFRYQVVQRAQKAGKRIVLPEGSEPRTVQAAAICQARGIARCVLLAKPEEVQAVAQAQGIVLPEGLEIIDPDLVRQRYVEPMVELRKGKGLNAPMAEQQLEDSVVLATMMLALDEVDGLVSGAIHTTASTIRPALQLIKTAPGYNLVSSVFFMLLPDQVLVYGDCAVNPDPSASDLAEIAVQSAASAQAFGIPARVAMISYSTGDSGSGVDVDKVREATRLAREQRPDLLIDGPLQYDAAAIASVGRQKAPNSPVAGQATVFIFPDLNTGNTTYKAVQRSADCVSVGPMLQGLRKPVNDLSRGALVEDIVYTIALTAIQADAQAPA

SEQ ID NO: 11806 - protein, 312 aa, Pseudomonas aeruginosa
MTSIVVAALYKFVTLDDYVALREPLLQTLLDNGVKGTLLLAEEGINGTVSGSREGIDALFAWLRSDPRLADIEHKESYCDEQPFYRTKVKLKKEIVTLGVPGVDPNKQVGQYVEAKDWNALISDPEVLLIDTRNDYEVAIGTFEGAVDPKTRSFREFPEYIKAHYDPARHKKVAMFCTGGIRCEKASSYMLGAGFEEVFHLKGGILKYLEEVPQEQSLWRGDCFVFDNRVTVRHDLSEGEYDQCHACRNPVSLEDRQSEHYVPGISCPHCWDSLSEKTRAGARERQKQIELARQRNQPHPLGRDPRQSTLEN

SEQ ID NO: 11807 - protein, 275 aa, Pseudomonas aeruginosa
MNRQIVRSALFVPATRPERIPKALASGADRVIVDLEDAVEEGLKVEARANLRRFLVDTPEARVLVRINAAEHPGHADDLALCRDHAGVIGLLLPKVESAAQVRHAAVASGKPVWPIVESARGLAALGEIAAAAGVERLSFGSLDLALDLDLNSGSNAAEQILGHARYALLLQTRLAGLAPPLDGVYPAIQNRAGLVEAVRFARDMGFGGLLCIHPSQVEPIHQTLMPSPAELEWARRVAEAGASGAGVFVVDGEMVDAPVLGRARRLLERAGEGG

SEQ ID NO: 11808 - protein, 406 aa, Pseudomonas aeruginosa
MSAPHAQVERADFDRYMVPNYAPAAFIPVRGEGSRVWDQSGRELIDFAGGIAVTSLGHAHPALVKALTEQAQRIWHVSNVFTNEPALRLARKLVDATFAERVFLANSGAEANEAAFKLARRYANDVYGPQKYEIIAASNSFHGRTLFTVNVGGQPKYSDGFGPKFEGITHVPYNDLEALKAAISDKTCAVVLEPIQGEGGVLPAQQAYLEGARKLCDEHNALLVFDEVQSGMGRVGELFAYMHYGVVPDILSSAKSLGGGFPIGAMLTTGEIAKHLSVGTHGTTYGGNPLASAVAEAALDVINTPEVLDGVKAKHERFKSRLQKIGQEYGIFDEIRGMGLLIGAALTDEWKGKARDVLNAAEKEAVMVLQASPDVVRFAPSLVIDDAEIDEGLERFERAVAKLVRG

SEQ ID NO: 11809 - protein, 874 aa, Pseudomonas aeruginosa
MKSAEIREAFLRFFEEKGHTRVASSSLIPANDPTLLFTNAGMNQFKDCFLGLEKRAYTRATTSQKCVRAGGKHNDLENVGYTARHHTFFEMLGNFSFGDYFKRDAIHYAWEFLTGEKWLNLPKEKLWVTVYATDDEAYDIWTKEVGVPAERMVRIGDNKGAPYASDNFWAMGDTGPCGPCTEIFFDHGPEIWGGPPGSPEEDGDRYIEIWNNVFMQFNRTADGVMHPLPAPSVDTGMGLERVSAVLQHVHSNYEIDLFQNLLKASAEAIGCANDDAPSLKVVADHIRSCSFLIADGVLPSNEGRGYVLRRIIRRACRHGNKLGARGTFFHKIVAALVAEMGDAFPELKQQQAHIERVLKTEEEQFAKTLEQGLKILEQDLAELQGSVIPGNVVFKLYDTYGFPVDLTNDIARERELTIDEDGFEREMEAQRERARASSAFGMDYNSLVKVDGETRFLGYQGVSGAGQIVALFRDGQAVERLEEGEEGVVVLDQTPFYAESGGQVGDSGYLEAAGVRFDVRDTTKAGGAHLHHGVVARGNLSVGGAVKAEVDASVRQATALNHSATHLLHAALRQVLGDHVQQKGSLVDSQRLRFDFSHFEAIKAEQLKALEDIVNAEIRRNTEVETEETDIDTAKAKGAMALFGEKYGDQVRVLSMGGDFSVELCGGTHVSRTGDIGLFKITSEGGVAAGVRRIEAVTGAAALAYLNGAEEQLKEAASLVKGSRDNLLDKLGALLERNRSLEKELEQLKAKAASAAGDDLSAAAVEIKGAKVLAARLDGLDGKALLALVDQLKNKLGRAVILLGGELDGKVVLVAGVTQDLTGQLKAGELMKQAAAAVGGKGGGRPDMAQGGGTDAAKLDEALALAQRFVEQGL

SEQ ID NO: 11810 - protein, 642 aa, Pseudomonas aeruginosa
MFAPPSTETLNRFFLLSWLVVLWQVLRLQDGIVFDDAWLPLWSVAASLSYAFLYIVPVYLACRLLLHFHDRLPVRLSPWLAGVLAIVGSAAVQILLYADRTLYDLYGFHLNGFSIGLLVSPGGLSSLGSGDGTLLSASLAALALLCLQVLLYSACQVSRERLPALPRRAWRYLLAAFLCLALGERLVYAFSSLRDYRPILLASERYPLYLPLTVRSLARSLGIQPTPTQRELLQQQSDLHYPLRPLEISAPAHPLNIVWIVAESLRGDMLDPRYMPRLWDFSNRAIRLDNHYSSGNLTQMGVFGMFYGLHGGYWDAVLKAGQPPVLMEVLRQQNYQFRINAAQRFSYPPFDRSVFVNLRPQDLHVLDSPEPAWQRDARNTDDLLRFVDRRLPDRPFFACLFLESSHANYSFRDETAKIRPYLVNFNYLTTDFQAQMPLIKNRYLNAVREVDTQIGRLLQHLENQHLLENTAVVVLGDHGEEFMERSRWGHNTEFNRYQTGTVAVLSIPGQAPRAVRGITSHIDLPATLLPLLGVRNPPRDYSLGQDLLAADYHRDYAVSADTTRIAYLGEGFKVSFPLRGADRHHGPVSDGDDRPLDVEQQEAIRGPLRAARLELLQDLGRFSALPVGEEPSPRNLATSLTP

SEQ ID NO: 11811 - protein, 329 aa, Pseudomonas aeruginosa
MRILFFSSQAYDSESFQASNHRHGFELHFQQAHLQADTAVLAQGFEVVCAFVNDDLSRPVLERLAAGGTRLVALRSAGYNHVDLAAAEALGLPVVHVPAYSPHAVAEHAVGLILTLNRRLHRAYNRTREGDFSLHGLTGFDLHGKRVGVIGTGQIGETFARIMAGFGCELLAYDPYPNPRIQALGGRYLALDALLAESDIVSLHCPLTADTRHLIDAQRLATMKPGAMLINTGRGALVNAAALIEALKSGQLGYLGLDVYEEEADIFFEDRSDQPLQDDVLARLLSFPNVVVTAHQAFLTREALAAIADTTLDNIAAWQDGTPRNRVRA

SEQ ID NO: 11812 - protein, 234 aa, Pseudomonas aeruginosa
MKPIQLPLSVRLRDDATFANYYPGANAAALGYVERLCEAEAGWAESLIYLWGHDGVGRSHLLQAACLRFEQFEERTIYLPMADLVQYGPEIFDDLEQCELVCIDDLDVLVGKREWEEGLFHLFNRLRDTGRRLLLAASKSPRELQVKLPDLKSRLTMALIFQLHGLSDEDKLRALQLRASRRGLHLTDEVGRFILNRGSRSMNSLFDLLEQLDRASLQAQRKLTIPFLKETLGW

SEQ ID NO: 11813 - protein, 571 aa, Pseudomonas aeruginosa
MRTSQYLLSTLKETPADAVVISHQLLLRAGMIRRLASGLYTWLPMGLRVLRKVETIVREEMNAAGALEVLMPAVQPAELWQESGRWEQYGPELLRLKDRHEREFCVGPTHEEVITDLARNELNSYKQLPINFYQIQTKFRDEIRPRFGLMRGREFIMKDAYSFHLSQDSLQQTYDGMYQAYSKIFSRLGLDFRPVQADNGSIGGSGSHEFHVLANSGEDDIVFSDSSDYAANIEKAEAVPRESARGSATEDMRLVDTPNTKTIAALVDGFQLPIEKTIKTLVVHGAEEGTLVALIVRGDHELNEIKAANQPLVASPLVFASEAEIRAAIGAGPGSLGPVNLPIACIVDRSVALMSDFAAGANIEDKHYFGVNWERDLPLPEVADLRNVVEGDPSPDGKGTLVIKRGIEVGHIFQLGTKYSEAMKLSVLSEQGKPVNLIMGCYGIGVSRVVAAAIEQNHDERGILWPSALAPFQIALVPLKYETESVKQATDKLYAELTAAGFEVLLDDRDKKTSPGVKFADMELIGIPHRIVISDRGLSEGVLEYKGRRDSESQNLPIGELMSFITEKLSR

SEQ ID NO: 11814 - protein, 156 aa, Pseudomonas aeruginosa
MEINIGIGEQDRAAIAEGLSRLLADTYTLYLKTHNFHWNVTGPMFNTLHLMFEGQYTELAVAVDDIAERIRALGFPAPGTYAAYARLSSIKEEEGVPEAEEMIRQLVQGQEAVVRTARSIFPLLDKVSDEPTADLLTQRMQVHEKTAWMLRSLLAS

SEQ ID NO: 11815 - protein, 591 aa, Pseudomonas aeruginosa
MMRSHYCGQLNESLDGQEVTLCGWVHRRRDHGGVIFLDVRDREGLAQVVFDPDRAETFAKADRVRSEFVVKITGKVRLRPEGARNPNMASGSIEVLGYELEVLNQAETPPFPLDEYSDVGEETRLRYRFIDLRRPEMAAKLKLRARITSSIRRYLDDNGFLDVETPILGRPTPEGARDYLVPSRTYPGHFFALPQSPQLFKQLLMVAGFDRYYQIAKCFRDEDLRADRQPEFTQIDIETSFLDESDIIGITEKMVRQLFKEVLDVEFDEFPHMPFEEAMRRYGSDKPDLRIPLELVDVADQLKEVEFKVFSGPANDPKGRVAALRVPGAASMPRSQIDDYTKFVGIYGAKGLAYIKVNERAKGVEGLQSPIVKFIPEANLNVILDRVGAVDGDIVFFGADKAKIVCDALGALRIKVGHDLKLLTREWAPMWVVDFPMFEENDDGSLSALHHPFTSPKCTPAELEANPGAALSRAYDMVLNGTELGGGSIRIHDKSMQQAVFRVLGIDEAEQEEKFGFLLDALKYGAPPHGGLAFGLDRLVMLMTGASSIREVIAFPKTQSAGDVMTQAPGSVDGKALRELHIRLREQPKAE

SEQ ID NO: 11816 - protein, 173 aa, Pseudomonas aeruginosa
MPHSYRKMESPVGTLTLVARDDAFLVAILWQHERPNRVPLDEMRLSEDSSLLAETERQLREYFSGKRSRFELPLDFQGTEFQKKVWSALLTIPFGETRSYTEIAVQIGSPNAVRAVGAANGRNPLSIVAPCHRVIGASGGLTGFAGGLAAKQWLLRLETRGRTPDLLSMIEDE

SEQ ID NO: 11817 - protein, 933 aa, Pseudomonas aeruginosa
MILALIIALPFMGALLPLLAERGGRTLCAASAGVAPLIGLILLLGQRGTVFAGQTLTASYSWLPEIGINLSLRLDGLGFLFALLILGIGLLVILYARYYLSEQEPMGRFFAFLLLFMGSMLGVVLAENLLLMMLFWELTSLSSFLLIGFWGSRSDARKGARMALTVTGGGGLALLAGVLLLGHIAGSFELTEVLAAGELIRAHALYPLVLILILLGVFTKSAQFPFHFWLPHAMAAPTPVSAYLHSATMVKAGVFLLARLYPALAGTEWFFYLVSLSGLVTLLLGAGMALFQHDLKGLLAYSTISHLGLITLLFGLDSPLSNVAAVFHIINHATFKASLFMAAGIIDHETGSRDMRLINGMWKYLPHTAVLAIVASLAMAGVPLLNGFLSKEMFFGETLSQNLLGSFNWLVPAVATLAGVFSVAYSLRFIHDVFFNGEPARLPKFPPHEPPRYMKVPVEILVFLCLLVGMLPAYTVAPLLAAAASASLGGQLPEYSLAIWHGFNLPLLMSVVALVGGVLVYVLRKPLFNWYAGLPEVDAKLVFEQQVQRVVALAARLTAWLENGSLQRYLAWLLGAALVVVAVELAPLARLTGSRGLTPLDGITALGMLVLAFSGLATALFHRMRLVALLILSVAGLLVALAFARFSAPDLALTQLSVEVVTMVLLMLALYFLPSRTPAESSSLRGLRDVALAGGVGMLVALLAYAVLTRPYESIAGFFVENSVSGGGGYNVVNVILVDFRGFDTLGEISVLAIAGVGIYAMLAGFALHKPTCDPQGRNWAHAKHPLILETLSRVLLPLALLISVFIFLRGHNLPGGGFIAGLVTAIALVLQYIASGSQWVEQRLPLNYAAMAGAGVLIAGLTGLGSWLFGYPFLTSAFGHFELPLIGEIELATAMLFDLGVYLTVVGAALLILSYLGKLSLMPEPVAQEEAL

SEQ ID NO: 11818 - protein, 291 aa, Pseudomonas aeruginosa
MSNERDTSRTPTPDPAEHNAFFPSPYSLSQYTSAKTDFDGADYPTPYKGGKKVLMIGTDERYILMQNASMFSTGNHPVEMLLPMYHLDKAGFEFDVATLSGNPVKLEMWAMPGEDEAVKSIYAKYLPKLKAPRKLADLLEQAVADDSPYAAVFVPGGHGVLAGIPHSREVKRLLNAFLAKDRYIITLCHGPACLLAPAVEEKPEDYPFKGYEICVFPDALDTGANLEIGYMPGPLPWLVGENLQKLGVKILNKGITGQVHRDRKLLTGDSPLASNNLGKLAAKTLLEAFAR

SEQ ID NO: 11819 - protein, 963 aa, Pseudomonas aeruginosa
MHTDTTRENPQASAPQAADSSQDLAATAPGQLRVIKRNGTVVPYTDDKITVAITKAFLAVEGGTAAASSRIHDTVRRLTEQVTATFKRRMPSGGTIHIEEIQDQVELALMRAGEQKVARDYVIYREARAAERKNAGAASDVAQPHPSIRITRADGSLSPLDMGRLNTIISEACEGLAEVDGALIERETLKNLYDGVAEKDVNTALVMTARTLVEREPNYSYVTARLLMDTLRAEALGFLGVAESATHHEMAELYAKALPAYIEKGAEFELVDAKLKEFDLEKLGKAIDHERDQQFTYLGLQTLYDRYFIHKDGIRFELPQIFFMRVAMGLAIEEKDREARAIEFYNLLSSFDYMSSTPTLFNAGTLRPQLSSCYLTTVPDDLSGIYGAIHDNAMLSKFAGGLGNDWTPVRALGSYIKGTNGKSQGVVPFLKVVNDTAVAVNQGGKRKGAVCAYLETWHLDIEEFLELRKNTGDDRRRTHDMNTANWIPDLFMKRVFDDGSWTLFSPSDVPDLHDLYGKAFEERYEYYEALASYGKLKLHKVVQAKDLWRKMLSMLFETGHPWLTFKDPCNLRSPQQHVGVVHSSNLCTEITLNTNKDEIAVCNLGSINLVNHIVDGKLDTAKLEKTVKTAVRMLDNVIDINYYSVPQAQNSNFKHRPVGLGIMGFQDALYLQHIPYGSDAAIAFADQSMEAISYYAIQASCDLADERGAYQTFQGSLWSQGILPIDSEKKLIEERGAKYIEVDLSETLDWAPLRERVQKGIRNSNIMAIAPTATIANITGVSQSIEPTYQNLYVKSNLSGEFTVINPYLVRDLKARGLWDPVMVNDLKYYDGSVQQIERIPQDLKDLYATAFEVETRWIVEAASRRQKWIDQAQSLNLYIAGASGKKLDVTYRMAWFRGLKTTYYLRALAATSTEKSTINTGKLNAVSAGGNDGLQAAPAAEPKPAPVPQACSIDNPDCEACQ

SEQ ID NO: 11820 - protein, 236 aa, Pseudomonas aeruginosa
MEQEAWRILIVEDDRRLAELTREYLEGNGLKVDIEANGALAAARILAERPDLVVLDLMLPGEDGLSICRQVRPQFDGPILMLTARTDDMDEVLGLEMGADDYVCKPVRPRVLLARIRALLRRSEAPEAGAPAADSKRLAFGRLVIDNAMREAWLDGTTIELTSAEFDLLWLLAANAGRILSREEIFNALRGIEYDGQDRSIDVRISRIRPKIGDDPMHPRLIKTVRSKGYLFVGEG

SEQ ID NO: 11821 - protein, 194 aa, Pseudomonas aeruginosa
MSLRLDLLRHGETESGGGFRGSLDDALTARGWAQMRTAVEGGRWDLLVSSPLQRCRAFAEELAQRQGIELELENDLRELHFGAWEGRSAAALMDGHSEALGRFWADPYAFTPPGGEPLSEFEARVLAAQRRLRQRHAGRRVLLVTHGGVIRLLLARARGLPREHLLQVDVGHGALFGLRAGEGDDRWHECREGE

SEQ ID NO: 11822 - protein, 179 aa, Pseudomonas aeruginosa
MGLLAAIMLAVYLANPFGTASLDPRARLLGVALYKIPSRSMEPTLQQGDFILANAARYAFADPQVGDLVVFRFPPQRSIAYVKRIAGIPGDRVRIDGGRLYVNERPVTEPYLAQQALRQPESLRMAERTVPAGQYFMLGDNRDNSNDSRYWGYVPRADLVGRVFAVWYAEDTRRIGSVR

SEQ ID NO: 11823 - protein, 513 aa, Pseudomonas aeruginosa
MNPSRRVALVAAIYLGTFIASLDISIVNLALPTLQYALDTDLAGLQWVVDAYALCLSAFMLSSGPLSDRYGRKLTWLLGVGLFSFGSLLCALATSLPLLLFGRAVQGIAGALLIPGALSILTQAFHDPGQRAQVIGGWTSFSALSLILGPLLGGLLVEHAGWQSIFLINLPLGLLALALGLWGIEETAHPEHAAFDPLGQLLSVVWLGALTYALIAAGEGGWLSPTAWPALLLAGVGLLGFLFVERRTARPLLPLGLFRQAGFAVCNLASFVLGFSGYASLFFLSLFFQQVQGASAQQAGFYLAPQFLAMGALSMLFGRLQRHVPLRRLLVLGYLVIGLAMLALAACGTGTAYPWVGLLLVALGLGMGLAVPGTGLAVMASVARERSGMASATMNTLRQAGMAVGIALLGALLSGRAIVVLGDRLEGLGIADAQRLATQAVTAHRLPGSLAGLDAELPAALAEGFRLAMLVAGASALLAAALLWRLRVSAGPAADTVGASGRTAGVQLQADRH

SEQ ID NO: 11824 - protein, 658 aa, Pseudomonas aeruginosa
MFGKLTLSAVPYHEPIVMVTLAVVALLGLGVVGAITYYRKWTYLWTEWLTSVDHKKIGVMYIVVALVMLVRGFADAIMMRGQLALAEGANHGYLPPEHYDQIFTAHGVIMIIFMAMPFMTGLMNLAVPLQIGARDVAFPFLNSLSFWLLVVSAMLVNVSLGLGEFARTGWVAYPPLSELAYSPGVGVDYYIWALQISGMGTLLTGINFLVTVFKMRTPGMKLMQMPIFTWTCTFANILIVASFPILTAALGLLSLDRYLDMHFFTNELGGNAMMYINLFWAWGHPEVYILILPAFGIFSEVTATFAGKRMFGYKSMVWASAAITFLGFTVWLHHFFTMGSGGDVNGFFGVATMLISIPTGVKLFNWLFTIYKGRLRFSTPILWTLGFMVTFTIGGMTGVLLAIPGADFLLHNSLFLIAHFHNTIIGGAVFGYLAGFAFWFPKAFGFTLDEKWGKRSFWCWLVGFYMAFMPLYILGFMGMTRRLNHYDNPLWKPYLVVAFFGAVLIFCGIACQLIQLFVSVRNRKQLADVNGDPWEGRTLEWATSSPPPFYNFAELPKVQDVDAFHDMKKAGTAYRKLPAYQPIHMPKNTAAGFSIAVFAFVFGFAAIWHIWWLMAVGFVGMIGSFIVRSYNQDVDYYVQPEEIEKIESARFQQLAKQV

SEQ ID NO: 11825 - protein, 422 aa, Pseudomonas aeruginosa
MKGNAPVLAAVDISKGFRVYRAPHQRMLQAIWGERKKFYSEFWALRNVSFQVFPGEVVGVIGCNGSGKSTLLQILAGTLRPTSGQVVRPERVAALLELGAGFNMEYTGRENIIFNAMLLGLGEQEISERLDEIIQFADIGEFIDRPVRTYSSGMFVRLAFSIAAYVDADVLIVDEALAVGDAAFQFKCLNRLEELLLKGITILLVSHDIQLIKSYCSRAIYLSKGRVIFDGDCETATELYLRDSIETQRAEVRSGSLIASGEHGNSVIAYGNGQGRFLSIRMGVLDEARDYFDSGERVWVEVLVQFDLPVPEHPKITLTIRDQRGYNLYGINNLLLGKALNVEPDGRLRTRISFDCDLQAGEYALTFRLENSLSESVCELMDKKVNAAIFRVFNSPKCFDAVVNLHGAFEPVPFCCETRATQ

SEQ ID NO: 11826 - protein, 477 aa, Pseudomonas aeruginosa
MTADKKAKILATLGPATRSRDDIRALVEAGANLLRLNFSHGDYADHAQRFAWVREVEAELNYPIGVLMDLQGPKLRVGRFAAGAVQLQRGQTFTLDLSDAPGDERRVNLPHPEIIHALEPGMSLLLDDGKIRLEVVNCHSDAIETRVAVGGELSDRKGVNVPEAVLQLSPLTDKDRRDLAFGLELGVDWVALSFVQRPEDIDEARGLIGDKAFLMAKIEKPSAVSAIEAIAERADAIMVARGDLGVEVPAESVPGIQKRIVQVCRQLGKPVVVATQMLESMRFSPAPTRAEVTDVATAVGAGADAVMLSAETASGQYPREAVEMMAKIVRQVEAEPDYHVQLEVNRPQPDATVSDAISCAIRRVSRILPVAVLVNYTESGNSTLRAARERPKAPILSLTPNLRTARRLTVAWGVYSVVNEQLAHVDEICSTALDIALAQRMARRGDTVVVTAGVPFGRPGSTNMLRIETVAPPLGDL

SEQ ID NO: 11827 - protein, 434 aa, Pseudomonas aeruginosa
MTRNAKAYRAAILHSIADPAEVGVERSYEYFEDGLLLVEDGKVARLGDAETLLGEIGEVEVFEYRDALITPGFIDTHIHFPQTGMIASYGEQLLDWLNTYTFPTERQFGDQAHADQVAEIFLQELLRNGTTTALVFGSVHRQSVESLFEAARRLDLRLIAGKVMMDRNAPDYLTDTAESSYRDSKALIERWHGQGRLLYAVTPRFAPTSTAEQLDMAARLLREHPGVYLHTHLSENLKEIEWVKELFPERSGYLDVYDHHGLLGPRSVFAHGVHLCDGECQRLAETGSAVAFCPTSNLFLGSGLFDLPKLERYKVKVGLGTDVGAGTSFSQLQSLNEAYKVMQLQGARLDPFKSLYLATLGGARALELDDRIGSFATSNEADFVVLDYHATPLLSYRLSQAGSLAERLFALTILGDDRTVKETFAAGRSVHRRD

SEQ ID NO: 11828 - protein, 1162 aa, Pseudomonas aeruginosa
MRLKSIKLAGFKSFVDPTTVNFPSNMAAVVGPNGCGKSNIIDAVRWVMGESSAKNLRGESMTDVIFNGSNTRKPVSQASIELIFDNAETTLVGEYAQYAEISIRRRVSRDGQNTYFLNGTKCRRRDITDIFLGTGLGPRSYSIIEQGMISKLIEARPEDLRNFIEEAAGISKYKERRRETESRIRRTQENLARLTDLREELGRQLERLHRQAQSAEKYQEHKAEERQLKAQLGAVRWRDLNEQVGQRERVIGDQEIAFEALVAEQRGADAGIERLRDGHHELSERFNQVQARFYSVGGDIARVEQSIQHGQQRQRQLQDDLREAERTRQETESHLGHDRTLLATLAEEMAMLAPEQELSAAAAEEAGIALEQAEQGMQAWQQQWDAFNQQSAEPRRQAEVQQSRIQHLEQSLERLQDRERRLQEERGQLAADPEDAAILELNEQVAIAELALEELQLQEQGQAERLEQLRQELQQLAAEQHQAQGELQRLNGRIASLEALQQAALDPGQGALEWLREQGLEQRPRLAEGLRVEPGWELAVETVLGADLQAVLLDGFDGLALAGFGKGELRLLSPARGAATAAGSLLDKVRADADLSPWLARVKPVETLEQALAQRGALDDGESLISRDGYWVGRHFLRVRRSDEAQGGMLARAQELEALQERREALETRVAEGEERLAAARDEQRELEGAREQVRRQVQEEGRRHGELKAQLSAQQAKVEQLVLRRRRLDEEVAELAEQRALEQEQLSEARLTLQEALDSMALDTERRESLLAERDALRERLDRIRQDARTHKDHAHQLAVRVGSLKAQHNSTQQALERLDQQSARLNERCEQLNLNLEEGAAPLEELRMKLEELLERRMAVEDELKQARLALEDADRELREVEKRRGQAEQQSQLLRGQLEQQRLEWQGLVVRRKALQEQLAEDGYDLHTVLANLPLDASERDWEERLESLAARIQRLGPINLAAIEEYQQQSERKRYLDSQNDDLAEALETLENVIRKIDRETRNRFKETFDQINAGLQALFPKVFGGGTAYLELTGEDLLDTGVAIMARPPGKKNSTIHLLSGGEKALTALALVFAIFQLNPAPFCMLDEVDAPLDDANVGRYARLVKEMSEKVQFIYITHNKIAMEMADQLMGVTMHEPGCSRLVAVDVEEAVALAEA

SEQ ID NO: 11829 - protein, 794 aa, Pseudomonas aeruginosa
MTDTQAAAERIAQLRTELDTHNYRYYVLDEPSIPDAEYDRLFRELQALEAEYPQLLTPDSPTQRVSGTPASAFGEVRHEIPMLSLGNAFEEQDLLDFDRRVREGLADLLPGGDLLGGGAEVEYSCEPKLDGLAVSLLYERGQLVRGATRGDGSTGEDITSNVRTIRNVPLKLHGEGWPEILEVRGEVFMSKAGFEALNAKAVETGGKTFANPRNAAAGSLRQLDSKITASRPLEFCAYGFGQVSGTLPDTQVGILEAFRGWGIPISRELRLVKGAQACRDYYDDIGRRRDALAYEIDGVVFKVNRIAFQRELGFRAREPRWAIAHKFPAREELTELLGVEFQVGRTGAVTPVARLKPVQVAGVTVSNATLHNMDEVARLGLRIGDTVVIRRAGDVIPQVMQVVLERRPADAQAIEVPEHCPVCGSAVERTQLVKRSKGKESISEGAIYRCVGRLSCQAQLKQAIIHFVSRRAMDIDGLGDKIVEQLVDRGLVASPADLYTLTYEQVFELEGFAELSTNNLLTAIADSRKPSLARFIFALGIPDVGEETAKLLARSLGSLERIGKALPEVLTYLPDVGAEVAYEIHNFFADEHNRQVIAQLRDAEHGVQLQEEGEVAAEFAACASLAGFIDKLNIPFIAATGAEKLASRFGSLDGIIRADWLDLRQVERLPERAAKSLRDFFDEPANVQRALAIEAQLREFGMHWQSERKAVEGLPLAGQTWVLTGTLEAMSRDVAKDKLEGLGAKVAGSVSAKTHCVVAGPGAGSKLAKANELGVKVLDEDGLLKLFDEHGVAR

SEQ ID NO: 11830 - protein, 681 aa, Pseudomonas aeruginosa
MSYQVLARKWRPRSFREMVGQTHVLKALINALDNQRLHHAYLFTGTRGVGKTTIARILAKCLNCETGVSSTPCGECSVCREIDEGRFVDLIEVDAASRTKVEDTRELLDNVQYSPTRGRYKVYLIDEVHMLSSHSFNALLKTLEEPPPHVKFLLATTDPQKLPVTILSRCLQFSLKNMPPERVVEHLTHVLGAENVPFEDDALWLLGRAADGSMRDAMSLTDQAIAFGEGKVLAADVRAMLGTLDHGQVYGVLQALLEGDARALLEAVRHLAEQGPDWGGVLAEILNVLHRVAIAQALPEAIDNGQGDRERVLALAQALPAEDVQFYYQMGLIGRRDLPLAPDPRSGFEMVLLRMLAFRPADADGVPRTPLKDLGISKATTDPANSPVAGAASPAPVATVAPAPVVAAPVEAPAAPPAAPSAPPAAVEARVTEAVVEEPAAAAEVVDLPWEEPAPSLAAEPEPEPEPEPLAVEAPSVPPAVAVEAVVETVLEALPAALPVAPDEQDEQDDEPPPADDYYEVDMDTLAYLDATPEPDVVVVEEPLPAAKPATGLAAEWLELFPRLGLGGLTASIGANCTLVAADDDHWHLHLDPGQSALFNATQQRRLNDALNQHLGRTLKLEVTLQKPEQETPAQAAARRRAERQRAAEASIDADPLVRQLREQFAAVVRDGTIEPLEAKA

SEQ ID NO: 11831 - protein, 108 aa, Pseudomonas aeruginosa
MMKGGMAGLMKQAQQMQEKMQKMQEELANAEVTGQSGAGLVSVVMTGRHDVKRVSLDDSLMQEDKEILEDLIAAAVNDAVRKIEQNNQEKMSGFTSGMQLPPGFKMPF

SEQ ID NO: 11832 - protein, 198 aa, Pseudomonas aeruginosa
MSFSPLIRQLIESLRILPGVGQKSAQRMALMLLERDRSGGLKLAQALTAAMEGVGHCRQCRTLSEEELCPQCADPRRDDSLLCVVEGPLDVFAVEQTGYRGRYFVLKGHLSPLDGLGPEAIGIPELEARIRDGAFSEVILATNPTVEGEATAHYIAQLLAGRGLTLSRIAHGVPLGGELELVDGGTLAHALAGRRPIS

SEQ ID NO: 11833 - protein, 295 aa, Pseudomonas aeruginosa
MKSFENKVAAITGAGSGIGRALAVELGRQGCHLALADVNAAALEETRQLLASSGVRVSTAVVDVADREQVQAWADKAASEHGRVNLIFNNAGVAHAGTVEGSDYSEYEWIMNINFWGVVNGTKAFLPHLKASGNGHVVNVSSVFGLFAQPGMSAYNATKYAVRGFTESLRQELDMEDSGVSASCVHPGGIKTNIAKTARMNESMAKVTGQAPDKAREQFNDQLLRTTPEKAAQVILRGVQRDSRRILIGTDAHAIDVMLRLAPVLYQRLVTASMRLAARFAPRPKSPQGAREASE

SEQ ID NO: 11834 - protein, 943 aa, Pseudomonas aeruginosa
MHESVMQRMWNSAHLSGGNAAYVEELYELYLHDPNAVPEEWRTYFQKLPADGNPAPDVSHSTVRDHFVLLAKNQRRAQPVSAGSVSSEHEKKQVEVLRLIHAYRLRGHQASTLDPLGLWQRPAPADLSIDHYGLTGADLDTTFRTGELYIGKEEATLREIVDSLKSTYCGTFGAEFMHIVDSEQRKWFLQRLESVRGRPGFSAEARAHLLERLTAAEGLEKYLGTKYPGTKRFGLEGGESLIPMVDEIIQRCGSYGAKEIVIGMAHRGRLNVLVNTLGKNPRDLFDEFEGKKIVELGSGDVKYHQGFSSNVMTSGGEVHLALAFNPSHLEIVSPVVEGSVRARQDRRKDSSGDKVVPISIHGDAAFAGQGVVMETFQMSQTRAYKTGGTIHLVINNQVGFTTSRQDDARSTEYATDVAKMIQAPIFHVNGDDPEAVLFVTQLAVDYRMQFKRDVVIDLVCYRRRGHNEADEPSGTQPLMYQQIAKQRTTRELYADALVNAGVLSAEQVQSKIDDYRDALDNGLHVVKSLVKEPNKELFVDWRPYLGHAWTARHDTRFDLKTLQELSSKMLEVPEGFVVQRQVSKIYEDRQKMAAGGLPINWGFAETLAYATLLFEGHPVRMTGQDVGRGTFSHRHAVLHNQKDDSVYVPLANLFDGQPRLDIYDSFLSEEAVLAFEYGFATTTPNSLVIWEAQFGDFANGAQVVIDQFITSGESKWGRLCGLTMLLPHGYEGQGPEHSSARLERYLQLCAEQNIQVCVPTTPAQVYHMLRRQVIRPLRKPLVVMTPKSLLRHKLAISTLEDLANGSFQTVIPEIDSLDPKKVDRVVLCSGKVYYDLLEKRRAEGREDTAIVRIEQLYPFPEDDLAEVLAPYKNLKHIVWCQEEPMNQGAWFCSQHHMRRVIAAHKKGLNLEYAGREGSAAPACGYASMHAEQQEKLLQDAFTV

SEQ ID NO: 11835 - protein, 478 aa, Pseudomonas aeruginosa
MSQKFDVVVIGAGPGGYVAAIRAAQLGLKTACIEKYIGKEGKVALGGTCLNVGCIPSKALLDSSYKYHEAKEAFKVHGIEAKGVTIDVPAMVARKANIVKNLTGGIATLFKANGVTSFEGHGKLLANKQVEVTGLDGKTQVLEAENVIIASGSRPVEIPPAPLTDDIIVDSTGALEFQAVPKKLGVIGAGVIGLELGSVWARLGAEVTVLEALDKFLPAADEQIAKEALKVLTKQGLNIRLGARVTASEVKKKQVTVTFTDANGEQKETFDKLIVAVGRRPVTTDLLAADSGVTLDERGFIYVDDHCKTSVPGVFAIGDVVRGAMLAHKASEEGVMVAERIAGHKAQMNYDLIPSVIYTHPEIAWVGKTEQTLKAEGVEVNVGTFPFAASGRAMAANDTTGLVKVIADAKTDRVLGVHVIGPSAAELVQQGAIGMEFGTSAEDLGMMVFSHPTLSEALHEAALAVNGHAIHIANRKKR

SEQ ID NO: 11836 - protein, 295 aa, Pseudomonas aeruginosa
MSVLINKDTKVICQGFTGSQGTFHSEQAIAYGTKMVGGVTPGKGGTTHLGLPVFNTVKEAVEATGAEASVIYVPAPFCKDSILEAAFGGIKLIVCITEGIPTLDMLDAKVKCDELGVRLIGPNCPGVITPGECKIGIMPGHIHLPGKVGIVSRSGTLTYEAVKQTTDAGFGQSTCVGIGGDPIPGSNFIDILKLFQEDPQTEAIVMIGEIGGSAEEEAAAFIKANVTKPVVSYIAGVTAPPGKRMGHAGAIISGGKGTADEKFAALQDAGVKTVRSLADIGKALAELTGWEVKKA

SEQ ID NO: 11837 - protein, 437 aa, Pseudomonas aeruginosa
MTHLKGFDLLALGFMTFALFLGAGNIIFPPSAGMAAGEHVWSAAFGFLLTGVGLPLLTVVALARVGGGIGRLTQPIGRRAGVAFAIAVYLAIGPLFATPRTAVVSFEMGVAPFTGDGGVPLLIYTVAYFSVVLFLVLNPGRLVDRVGKVITPVLLSALLVLGGAAIFAPAGEIGSSSGEYQSAPLVQGFLQGYLTMDTLGALVFGIVIATAIRDRGISDSRLVTRYSMIAGVIAATGLSLVYLALFYLGATSQGIAGDAQNGVQILTAYVQQTFGVSGSLLLAVVITLACLTTAVGLITACGEFFSDLLPVSYKTVVIVFSLFSLLVANQGLTQLISLSVPVLVGLYPLAIVLIALSLFDRLWVSAPRVFVPVMIVALLFGIVDGLGAAKLNGWVPDVFAKLPLADQSLGWLLPVSIALVLAVVCDRLLGKPREAVA

SEQ ID NO: 11838 - protein, 340 aa, Pseudomonas aeruginosa
MTEQQPIAVLGGGSFGTAIANLLAENGQAVRQWMRDPEQAEAIRTRRENPRYLKGVKVHPGVDPVTDLERTLADCQLIFVALPSSALRKVLQPHQAALTDKLLVSLTKGIEAHTFKLMSEILEEIAPQARIGVISGPNLAREIAEHELTATVVASEDDELCARVQAALHGRTFRVYASRDRFGVELGGALKNVYAIMAGLAAAMDMGENTRSMLITRALAEMTRFAVKLGANPMTFLGLAGVGDLIVTCSSPKSRNYQVGHALGEGLSLEEAVSRMGETAEGVNTLKVLKEKSDEMQVYMPLVAGLHAILFEGRTLAQVIQLLMRGEPKTDVDFIPTTGF

SEQ ID NO: 11839 - protein, 690 aa, Pseudomonas aeruginosa
MNAQTQASKNALHKSLERRHNASTSLAALWRPALLQAFVKLDPRQLLRSPVMLVVELTAVLTTLLCFVPDQAVPTSVALQIALWLWFTVLFANFAEALAEGRGKARADSLKAGSQGLSANKRRADGSFESVVASSLRKGDVVRVQAGEMIPGDGEVIEGVAAVNEAAITGESAPVIRESGGDRSAVTGNTQVVSDWLLVRIGANPGESTLDRMIALVEGAKRQKTPNEVALDILLIGLTLIFLLVVVTLKPFALFAGGNLPLVFLVALLVTLIPTTIGGLLSAIGIAGMDRLVRLNVIAKSGRAVEAAGDVHVLLLDKTGTITFGNRRCSALYAAPGVSGKELAEGALLASLADDTPEGKSIVEYLRILHPIEEPRREELTPIAFSAETRLSGVDWNGQVYRKGAVDAALRFIDLPREKMPEVLSREVDKIAQSGGTPLLVVANGRLLGAIHLKDVVKPGIRERFAELRRLGIRTVMVTGDNPLTAAAIAAEAGVDDVIAEATPEKKLARIRQEQGEGRLVAMCGDGANDAPALAQADVGMAMNDGTQAAREAANLVDLDSDPTKLLDVVQVGKELLVTRGALTTFSIANDVAKYFAILPALFVGIYPQLDVLNVMRLQSPQSAILSAIVFNALIIVALIPLALRGVRVQAADASQLLQRNLLIYGVGGLVAPFLGIKAIDLLLTAVGLA

SEQ ID NO: 11840 - protein, 183 aa, Pseudomonas aeruginosa
MFKQLRPALASLLVLSLVTGVAYPLLVTGIAQLAFPEQANGSLLRDAEGKVLGSRLIAQKFDGEEWFHSRPSAGDYATVSSAASNLAPSNPALAERIARDAAQERIADQGPVPLALVTTSGSGLDPQLPPQAARYQALRVATARGLPLRLVEDLVESHTERPLVGPAVVNVLALNMALAGLKR

SEQ ID NO: 11841 - protein, 202 aa, Pseudomonas aeruginosa
MQLDFTTIAPAEAYRWLASTVTPRPIAWVSTLSAEGASNLAPFSFFQVISDEPPTLMVNVSLRDDGSLKDTLRNVQATGQLVIHLVGAAQAETMNATSAWLPHGVSEIETVGIPTVSSVRVAPPRIAAAAVAFECEVAEIKPYPAENPNCHLIFARVLLAHVDDAVLADERHVDSARLDLVGRLGGSHYSHTRDTFSMIRPR

SEQ ID NO: 11842 - protein, 253 aa, Pseudomonas aeruginosa
MSKLLSGQVALVTGGAAGIGRATALAFAAAGVKVVVADLDSAGGEGTVEAIRQAGGEALFIRCDVTRDAEVKALVEGCAAAYGRLDYAFNNAGIEIEQGKLADGNEAEFDAIMAVNVKGVWLCMKHQIPLMLAQGGGAIVNTASVAGLGAAPKMSIYAASKHAVIGLTKSAAIEYAKKGIRVNAVCPAVIDTDMFRRAYEADPRKAEFAAAMHPLGRVGRVEEIAAAVLYLCCDNAGFTTGIALPVDGGATAI

SEQ ID NO: 11843 - protein, 158 aa, Pseudomonas aeruginosa
MPDLKNHAVQQQAMMEAFFFAYQAFTTKPDEMLARRGLGRVHHRVLFFIARYPGLSVKELLALLGVTKQALNIPLRQLLEMNLIGSATADDDKRKRLLGLTAEGVRLEKALRREQSRLLQRCFEEAGGEAVSGWLAVNRTLARAHAGSRGEAATEAAD

SEQ ID NO: 11844 - protein, 185 aa, Pseudomonas aeruginosa
MQDDDFSLFKSEMRGVKRISVDRADTGKPRNDRQQLKQRQLNASVRNDEIRVDGLSDQFVIDVGPEDELSWARDGVQESQLRKLKQGLVPFDGSLDLHGMSVEKARQTLWDFLAEATRLEIRCVRVTHGKAARKDGRSPLVKSHVNTWLRQHPQVLGFTSCLPRHGGTGSVYVMLRRTMLEGRDE

SEQ ID NO: 11845 - protein, 363 aa, Pseudomonas aeruginosa
MSGNTYGKLFTVTTAGESHGPALVAIVDGCPPGLELSARDLQRDLDRRKPGTSRHTTQRQEADEVEILSGVFEGKTTGTPIGLLIRNTDQKSKDYSAIKDLFRPAHADYTYHHKYGVRDYRGGGRSSARETAMRVAAGAIAKKYLAGLGIQVRGYMSQLGPIEIPFRSWDSVEQNAFFSPDPDKVPELEAYMDQLRRDQDSVGAKITVVAEGVPPGLGEPIFDRLDAELAHALMSINAVKGVEIGAGFASIAQRGTEHRDELTPQGFLSNNAGGILGGISSGQPIVAHLALKPTSSITTPGRSIDTAGEPVDMITKGRHDPCVGIRATPIAEAMMAIVLLDQLLRQRGQNADVRVDTPVLPQL

SEQ ID NO: 11846 - protein, 323 aa, Pseudomonas aeruginosa
MQHVRLGNSGLKVSRLCLGCMTYGDPAWRPWVLDEERARPFIREALEAGIDFFDSADIYSTGESERILGRALRDFAQREDLVIATKAFFPMSDRPNACGLSRKHLLASVDASLRRLGTDYLDLFVIHRFDPDTPIEETCETLDSLVRVGKVRYLGASSMPAWRFMKMLAFQRHHGLAQFISMQSQYNLIVREDEEDLVPLCREEGIALTPWSPLARGLLAGARSAGTLRTRTDEQAPRWYGGREEVESTLGALEKLAAARGLPPAQLALAWLLGRNGVAAPIVGLSRPHHLEDALAALTLDLAEEECATLEAPLTARARTPRW

SEQ ID NO: 11847 - protein, 908 aa, Pseudomonas aeruginosa
MSTDSPLRTTASTCCYCGVGCGVLIEHDGERILGVQGDPRHPANFGRLCSKGASLHLTGDLQARALYPQLRLGKQLARARSDWESALEHAAGRFAETIREHGPDSVAFYISGQLLTEDYYAFNKLARALVGTNNIDSNSRLCMSSAVVGYKRSLGADAPPCSYEDLDCADCVLIAGSNMAFAHPVLFRRLEAAKAARPEMRIVVIDPRRTDTCELADLHLALLPGTDVALFHGILHILLWEDWIDRSFIAEHTEGFADLKELVRDYTPAAVADICGIDRADLQRCAEWIGRSPRFLSLWCMGLNQSSAGSAKNSALINLHLATGKIGRAGCGPFSLTGQPNAMGGRETGSLANLLPGHREAADPGHRAEVAHYWGVEQLPTSPGLSAIELFDAVHDGRIKALWIACTNPAQSLPDQRKIHEALARCPFVVVQEAFAGTETCQYADLLLPAASWGEKEGSVTNSERRISHVRRAVPPPGEARQDWNIVCDFARRLEGHLRPAKPGLFAFADSRSLFDEYKLLTAGRDLDLSGLSYALLDRLGPQQWPFPTGAEQGTARLYADGRFPTASGRAQLVAEPYRAAQEKRDARYPLTLNTGRLRDQWHGMSRTGTCARLFGHEEEALVHLHPEELRRRQLLDGQLVRLKSRRGALVLPVSADDSVRPGQAFLPMHWGDRFLKGLGCNVLTLPAFDPLSKQPELKHAGVQVESVELPWRLFALVETDIQARFEALRALCEVFDHASFSLAGRERPALLVSAAHHEAPGADLLERIDRQLELLDGPILAYDDPRRAIGKRVRLEDGRIVAVRLAGETLARDWLKELWLTGRADSELRRWLLAPLGAAPGRPSQGAGGKTLCSCQNVSQQTVLGGIARGLDLDGLKREFGCGTGCGSCVPEIKRLLAAPRPMAANA

SEQ ID NO: 11848 - protein, 108 aa, Pseudomonas aeruginosa
MNWLDICSLDEINPLGSRVVAGPKGDIAIFRAADDQVFALDDRCPHKGGPLSQGLIYGKRVACPLHNWQIELESGEAVAPDQGCAHRHPVRVENGRVLLGLDSVALCA

SEQ ID NO: 11849 - protein, 816 aa, Pseudomonas aeruginosa
MKKIKLVMVGNGMAGVRTLEELLKLNSDFYDITVFGAEPHPNYNRILLSPVLAGEQTFEEIVLNDLNWYAENGIKLLLDRKVVQIDRLRRRVVAADGSEAEYDRLLLATGSLPFILPIPGNRLQGVIGYRDIADTQAMIDCARTHSHAVVIGGGLLGLEAANGLKQRGMDVTVVHLSDWLLERQLDRTAGKLLQGALEARGIRFRLNTQTQELMDNGSGRVCAVQFNDGDVIPADLVVMAAGIRPNTELAESAGIPCNRGILVNDTLQTYDPRIYAVGECANHRGIAYGLVAPLFEQAKVCANHLAHLGYARYQGSVTSTKLKVTGIDLFSAGDFIGGEGSETITLSDPIGGVYKKLVIKDDVLVGACLYGDTADGGWYFRQIRENHNVAQIRDHLMFGENALGDVGHQGQNSAASMPDTAEVCGCNGVCKGTIVKAIQEHGLFSVDEVKKHTKAASSCGSCAGLVEQILISTVGGAADVKPKSEKAICGCSDLNHGQIRKAIREHRLTSLDAAMRFMDWKTPNGCATCRPALNYYLISTWPGEAKDDPQSRLINERAHANIQKDGTYSVVPRMWGGVTNAAELRRIADVADKYQVPMVKVTGGQRIDLLGVKKDDLPAIWKDLDMPSGHAYGKSIRTVKTCVGSEFCRFGTQNSTQLGIDLEHDLFNMWSPHKVKLAVSGCPRNCAEAGIKDVGIIGVDSGWEMYIGGNGGIKTEVAEFFVKLKTAEEVREYNGAFLQLYREEAFYLERTVHYLQRVGMEHIRKAVVEDAENRKALNDRLQFALSFEQDPWKQRIEQPQLKKEFERISLKQLENV

SEQ ID NO: 11850 - protein, 90 aa, Pseudomonas aeruginosa
MNKSELIDAIAASADIPKAVAGRALDAVIESVTGALKAGDSVVLVGFGTFAVKERAARTGRNPQTGKPIKIAAAKIPGFKAGKALKDAVN

SEQ ID NO: 11851 - protein, 265 aa, Pseudomonas aeruginosa
MGFLTGKRALIVGVASKLSIASGIAAAMHREGAELAFTYQNDKLRGRVEEFASGWGSRPELCFPCDVADDSQIEAVFAALGKHWDGLDIIVHSVGFAPGDQLDGDFTAVTTREGFRIAHDISAYSFIALAKAGREMMKGRNGSLLTLSYLGAERTMPNYNVMGMAKASLEAGVRYLAGSLGAEGTRVNAVSAGPIRTLAASGIKSFRKMLAANERQTPLRRNVTIEEVGNAGAFLCSDLASGISGEILYVDGGFNTTAMGPLDDD

SEQ ID NO: 11852 - protein, 510 aa, Pseudomonas aeruginosa
MSSDALPLLSIRGVGKTYAQPVLAEIDLQLFGGEVLALTGENGAGKSTLSKIVGGLERPGAGSLELLGRPYAPASRREAEALGVRMVMQELNLLPTLSVAENLFLHDLPRRAGWIDRRRLRAAAREAMAQVGLEAIDPDTLVGDLGIGHQQMVEIARNLIGDCRLLILDEPTAMLTAREVDMLFEQVERLRERGVAIVYISHRLEELARISQRIAVLRDGRLVCVEPIERYDADQLVTLMVGRDLGERFDLGPRQTGAPLLRVERLSRRGKVHEVSFEVRAGEIFGISGLIGSGRTELLRLIYGADRADGGQVLLGDPPQRLSLRSPADSVRQGVALITEDRKGEGLLLDQSISANLALGNLPALARHGVIDRRREEALARRQVEALRVRCADTAQAVGELSGGNQQKVVIGRWLERDCQVLLFDEPTRGIDVGAKFDIYALLAELTRRGKALVVVSSDLRELMLICDRIGVLSAGRMVDTFERDAWTQDALLAAAFAGYKKRDALLATS

SEQ ID NO: 11853 - protein, 332 aa, Pseudomonas aeruginosa
MSDPTSSATAAAAPTLRRGNYFGLGTYLGLAGALLAMIALFSALSSHFLSYGTFLAIANQIPDLVVLAVGMTFILIVGGIDLSVGSVLALAASAVSLATLGWGWGVLPAAMLGMACATLAGCVTGSITVAWRIPSFIVSLGVLEMARGLAYQMTDSRTAYIGDAYAWLSNPLAFGISPAFVIALLVMFAAQAVLTRTVFGRYLIGIGTNEEAVRLAGVNPKPYKIAVFALMGLLAGLAALFQISRLEAADPNAGVGLELQVIAAVVIGGTSLMGGRGSVVSTFFGVLIISVLAAGLAQIGASEPTKRIITGAVIVVAVVLDTYRSHRARRQG

SEQ ID NO: 11854 - protein, 308 aa, Pseudomonas aeruginosa
MQAKVLVVGSLNMDLVVRAPRLPRGGETLAGQSFITVPGGKGANQAVAAARLGAEVAMIGCLGDDAYGDQLYRALQAEGIDCQGVERVAGESSGVALIVVDDSSQNAIVIVAGGNGHLSPAVLARHEHLLEQAQVVVCQLESPLETVGHVLRRAHALGKTVILNPAPATRDVPAEWLPLVDYLVPNETESELLCRLPVDSLESAGRAAERLREMGAGRVIVTLGAQGALLVGEGRVEHFPVARVKALDTTAAGDTFVGGFAAALARGLDEAAAIRFGQAAAAISVTRLGAQTSIPSREEVERALVGEA

SEQ ID NO: 11855 - protein, 521 aa, Pseudomonas aeruginosa
MQFGAKPLFENVSVKFGNGNRYGLIGANGCGKSTFMKILGNDLEPSAGQVMLEPNVRLGKLRQDQFAYEDFSVIDTVIMGHEELWAVKAERDRIYSLPEMSEADGMAVAELEVQFAEFDGYTAESRAGELLLGLGIPLEQHFGPMSAVAPGWKLRVLLAQALFSDPDVLLLDEPTNHLDINTIRWLEGVLTARNSTMIIISHDRHFLNSVCTHMADLDYGELRLFPGNYDEYMTAAEQARERLLSDNAKKKAQIAELQSFVSRFSANASKAKQATSRARQIDKIQLEEVKPSSRVSPFIRFEQYKKLHRQAVTVENISKGYDGKPLFKGLSLQVEAGERVAIIGPNGIGKTTLLRCLVGDLPVDGGEVKWTDSADVGYFAQDHADDFADDMSLFDWMAQWTQGGEQLVRGTLGRMLFSNDEIKKSVKVISGGEQGRMLFGRLILKRPNVLVMDEPTNHLDMESIEALNLALDNYPGTLIFVSHDREFVSSLATRIIELGENGVTDFSGSYDDYLRSQGVIV

SEQ ID NO: 11856 - protein, 393 aa, Pseudomonas aeruginosa
MQDVVIVAATRTAVGSFQGSLAGIPAPELGAAVIRRLLEQTGLDAGQVDEVILGQVLTAGSGQNPARQAAIKAGLPVGVPAMTLNKVCGSGLKALHLGAQAIRCGDAEVIVAGGQENMSLAPYVMPGARTGLRMGHAKLVDSMIEDGLWDAFNDYHMGITAENLAEKYGLTREEQDAFAAASQQKAIAAIEGGRFRDEITPIQVPQRKGEPLGFDTDEQPRAGTTVEALAKLKPAFRKDGSVTAGNASSLNDGAAAVLLMSAAKAKALGLPVLARIASYASAGVDPAIMGIGPVSATRRALDKAGWSLEQLDLIEANEAFAAQSLAVGRELGWDAARVNVNGGAIALGHPIGASGCRVLVTLLHEMIRRDAKKGLATLCIGGGQGVALTLARD

SEQ ID NO: 11857 - protein, 536 aa, Pseudomonas aeruginosa
MNRELLRVENLSVAYGDTQVVKGIDFSLRAGETLALVGESGSGKSQTAHALLRLLPGAARLGGSVRLDGEELLALSPQALLAIRGQRIGMVFQEPMTSLNPLQRIGRQVGEGLRLHRRLRGAALRGRVLELLELAGLEQPRRLLEAYPHQLSGGQRQRVMLAMALACEPQLLIADEPTTALDVTVQKRLLELLQSLQRRLGMAILLISHDLNLVRRVADRVCVMRDGQIVEENACETLFRSPRHPYTRLLIEAEPGGLAEPVACRETCLEVRALSLDYPAPGGWLRRRAGLRAVHEVSLRLRRGSTLGIVGESGSGKSSLGQALLRLLPAEGQILFQGERLDRLHGKRLLPLRRQFQAVFQDPYGSLNPRLSVEQIVGEGLRIHGIGDAGERRARVLEALREVGLDEPCLERYPHEFSGGQRQRIAIARTLVLKPALILLDEPTSALDRSVQCQVVELLRRLQRRHGLSYLFISHDLAVVRALAHDILVLKDGRVVEQGSAAALFSQPRHPYTRELLGAIPALRLEEHLRVAGLGI

SEQ ID NO: 11858 - protein, 702 aa, Pseudomonas aeruginosa
MARTTPIELYRNIGIVAHVDAGKTTTTERILFYTGVNHKMGEVHDGAATMDWMVQEQERGITITSAATTAFWQGSTKQFPHRYRFNIIDTPGHVDFTIEVERSLRVLDGAVVVFSGADGVEPQSETVWRQANKYHVPRLAYVNKMDRQGADFLRVVAQIKQRLGHVPVPIQLAIGSEENFSGQIDLVKMKAIYWNDADQGTSYREEEIPAELRALAEEWRAHMVEAAAEANDELMNKYLEGEELSIEEIKAGLRQRTLANQIVPAVLGSSFKNKGVPLVLDAVIDYLPAPSEIPAIRGTDPDDEEKHDERHADDDEPFSALAFKIATDPFVGTLTFARVYSGVLTSGDAVLNSVKGKKERVGRMVQMHANQRDEIKEVRAGDIAALIGMKDVTTGDTLCAIDKPIILERMDFPDPVISVAVEPKTKADQEKMGIALSKLAQEDPSFRVKTDEETAQTIISGMGELHLDIIVDRMRREFGVEANIGKPQVAYRETIRNTCEIEGKFVRQSGGRGQFGHCWIRFAPADEGQEGLEFHNEVVGGVIPREFIPAIQKGIEDQMQNGVLAGYPLIGLKATVYDGSYHDVDSSEMAFKIAASMATKQLSQKGGAVLLEPVMKVEVVTPEDYMGDVMGDLNRRRGLIQGMEDTPAGKVIRAEVPLGEMFGYATDVRSMSQGRASYSMEFVRYAEVPASVAEGIVARQGR

SEQ ID NO: 11859 - protein, 247 aa, Pseudomonas aeruginosa
MNNLLLNCDIGESFGAWRMGLDAEVMPLIDCANIACGFHAGDPGTMRRTVALAVEHGVRIGAHPGYPDLVGFGRRSLACSAQEVEDLLLYQIGALDGLCRAQGTRVRYVKPHGALYQDMMRDPAILAAVLRALAAYDRTLPLMLMSTRDNTAARALGEAHGIELWFEAFADRAYDGAGYLVSRSQPGAVHHDAETVLAQALLLARGAALRASDGSALALEAQTLCVHGDNPASLAAVRRIRDALEAA

SEQ ID NO: 11860 - protein, 286 aa, Pseudomonas aeruginosa
MSEQRQTLPAQHQDQRPGHESQMQPKPEFVSADYRPAAKLEGKVALVTGGDSGIGRAVAVAFAREKADVVLVYLDENEDAAKTREIIESLGRQCLAFAGDVADAGFCRQVVDTLRQKWGRLDVLVNNAGEQHPQARLEDISEEQWEKTFRTNIFGMFQLTKAALPLMGKGGAIINTTSITAYKGNPQLIDYSSTKGAITSFTRSLSMNLVNRGIRVNAVAPGPIWTPLIPSTFSAEKVAHFGADTPMGRPGQPEELAASYVYLACNDSSYVSGQVLHVNGGTVVNG

SEQ ID NO: 11861 - protein, 1100 aa, Pseudomonas aeruginosa
MARREKPVFLNDPQWYKDAVIYQVHVKSFYDANNDGIGDFAGLIEKLDYIADLGVNTLWLLPFYPSPRRDDGYDIAQYRGVHSDYGSLADARRFIAEAHRRGLRVITELVINHTSDQHPWFIRARHAKKGSRARDYYVWSDSDEKYQGTRIIFIDTEQSNWTWDPVAQQYYWHRFYSHQPDLNFDNPQVLREVLGVMRYWLDMGVDGLRLDAIPYLIERDGTSSENLPETHQVLKRIRAELDAHYPDRMLLAEANQWPEDTRPYFGGEDGGEGDECHMAFHFPLMPRMYMAIAQEDRYPITDILRQTPDIPANCQWAIFLRNHDELTLEMVTDDERDYLWNHYAADRRARLNLGIRRRLAPLVERDRRRIELLHSLLLSMPGTPTLYYGDEIGMGDNIYLGDRDGVRTPMQWSVDRNGGFSRADPAKLVLPPILDPLYGYQTINVEAQARDPHSLLNWMRRLLAVRSQQKAFGRGSLKMLAPSNRRILAYLREYAEGERQDSILCVANLSRAAQAVELDLASHAGKVPVEMIGGMSFPPIGELTYLLTLPPYGFYWFYLADATQMPSWHVAADERLPELPTLVVKQRLGELLQGASRNILEGETLPAYLPKRRWFAGEKGQPRLCYIVPLDEAEPRCALCEVEIDGLRYQLPLGFLDADQRGDSLPQLLALARLRRGRKVGLLTDAASLPLFARKVLAQLRAEAVIAHGDGEIQFIPAAGLAEMDDIADEDVLPFSVEQSNSSIRFGERMVLKVLRKILPGLHPEIEVGGYLTRHGYPGIAPLLGEVRRVGADGEPHTLMILQGYLNNQGDAWNWTLDNLERAVRDEISAASEALEGQYDSLAELRGFAANLGARLGEMHSVLAGESDDPAFGSRESDEASVQAWALRIAEQLREAGKRLSEPPRPLQGEAAEQARRLLERLPALLERLPLLARQAAGGLLIRVHGDLHLGQVLMVQGDARFIDFEGEPARSLEERRQRHSPMKDVGGMLRSFDYAAAMVLRNAQSTDSSEQADSARRKVAMRYRSEARDAFLAGYRAAAAGLMHAWHGREGEGAALALACLEKAAYELLYEADYRPDWLEVPLAGLAELTEHLLKGKNR

SEQ ID NO: 11862 - protein, 238 aa, Pseudomonas aeruginosa
MFGELLAPQYLRWLLDGFLLTLGLALLSCLLATLIGAPLAIARLSRRRLLSWPARAYLALFRNTPLLVQLFFWYFGVPALLPEALVSWLNTPHETPLLDWPSFEFLAGAWGLTLYTSAFVAEEFRAGIASVRPEQRAAGLALGLTQRQVWRVVVLPQALRTALPPLLGQYMNALKNSSLAMAIGLAELSYASRQVETETFKTFQAFGIATLLYIGAIALIEAFGQALQQTRRYRQGGA

SEQ ID NO: 11863 - protein, 478 aa, Pseudomonas aeruginosa
MHSKSVDSLSLTRAGFIEYFLVATKLVHALTAIAPALFLLYYPGLVPVELRSNMLGLLLFFGALTVIMFQALDVYSDDIFSNRLRFRIMFFAWASAFCLLLFMYQGLGLFPYLSSKLVIFWFTGSLLLFGVQRLLVLRLYRAWMKRGMYLQRTVILGFTESGMHLAEYLVRNHDIRSGIIGFIDDRSERVPENYNSLPLLGNTKDLEKLIRQEQVDQVLVALPWFAEGRIGAIVHRLRQLPVNVLLVPDMAAFRHAHNRIVDVSGIPMFNASELPLRGWSPLIKRCEDLVLASIALVLFAPLMALVALAIRLDSKGPVLFRQKRYGYNNRLIWVFKFRSMYTERTDANAERQTTRDDDRITRVGRFIRKTSIDELPQLFNVLAGSMSMVGPRPHATATKAAGIPFEEAVSEYSSRHRVKPGITGWAQINGYRGETDTLHKIKKRVEYDLEYIAKWSVWFDLYILFRTVPAVLLTKEVY

SEQ ID NO: 11864 - protein, 350 aa, Pseudomonas aeruginosa
MNAMNPQHENAQTVTSMTMIQALRSAMDIMLERDDDVVVFGQDVGYFGGVFRCTEGLQKKYGTSRVFDAPISESGIIGAAVGMGAYGLRPVVEIQFADYVYPASDQLISEAARLRYRSAGDFIVPMTVRMPCGGGIYGGQTHSQSPEAMFTQVCGLRTVMPSNPYDAKGLLIACIENDDPVIFLEPKRLYNGPFDGHHDRPVTPWSKHPASQVPDGYYKVPLDKAAIVRPGAALTVLTYGTMVYVAQAAADETGLDAEIIDLRSLWPLDLETIVASVKKTGRCVIAHEATRTCGFGAELMSLVQEHCFHHLEAPIERVTGWDTPYPHAQEWAYFPGPARVGAAFKRVMEV

SEQ ID NO: 11865 - protein, 428 aa, Pseudomonas aeruginosa
MGTHVIKMPDIGEGIAEVELVEWHVQVGDSVNEDQVLAEVMTDKATVEIPSPVAGRILALGGQPGQVMAVGGELIRLEVEGAGNLAESPAAATPAAPVAATPEKPKEAPVAAPKAAAEAPRALRDSEAPRQRRQPGERPLASPAVRQRARDLGIELQFVQGSGPAGRVLHEDLDAYLTQDGSVARSGGAAQGYAERHDEQAVPVIGLRRKIAQKMQDAKRRIPHFSYVEEIDVTDLEALRAHLNQKWGGQRGKLTLLPFLVRAMVVALRDFPQLNARYDDEAEVVTRYGAVHVGIATQSDNGLMVPVLRHAESRDLWGNASEVARLAEAARSGKAQRQELSGSTITLSSLGVLGGIVSTPVINHPEVAIVGVNRIVERPMVVGGNIVVRKMMNLSSSFDHRVVDGMDAAAFIQAVRGLLEHPATLFLE

SEQ ID NO: 11866 - protein, 464 aa, Pseudomonas aeruginosa
MSQILKTSLLIVGGGPGGYVAAIRAGQLGIPTVLVEGAALGGTCLNVGCIPSKALIHAAEEYLKARHYASRSALGIQVQAPSIDIARTVEWKDAIVDRLTSGVAALLKKHGVDVVQGWARILDGKSVAVELAGGGSQRIECEHLLLAAGSQSVELPILPLGGKVISSTEALAPGSLPKRLVVVGGGYIGLELGTAYRKLGVEVAVVEAQPRILPGYDEELTKPVAQALRRLGVELYLGHSLLGPSENGVRVRDGAGEEREIAADQVLVAVGRKPRSEGWNLESLGLDMNGRAVKVDDQCRTSMRNVWAIGDLAGEPMLAHRAMAQGEMVAELIAGKRRQFAPVAIPAVCFTDPEVVVAGLSPEQAKDAGLDCLVASFPFAANGRAMTLEANEGFVRVVARRDNHLVVGWQAVGKAVSELSTAFAQSLEMGARLEDIAGTIHAHPTLGEAVQEAALRALGHALHI

SEQ ID NO: 11867 - protein, 565 aa, Pseudomonas aeruginosa
MSSQRRNYRFILVVTLFVLASLAVSGRLVYLQVHDHEFLADQGDLRSIRDLPIPVTRGMITDRNGEPLAVSTEVASIWCNPREMAAHLDEVPRLAGALHRPAAALLAQLQANPNKRFLYLERGLSPIEASEVMALGITGVHQIKEYKRFYPSSELTAQLIGLVNIDGRGQEGTELGFNDWLSGKDGVREVAINPRGSLVNSIKVLKTPKASQDVALSIDLRLQFIAYKALEKAVLKFGAHSGSAVLVNPKSGQILAMANFPSYNPNNRASFAPAFMRNRTLTDTFEPGSVIKPFSMSAALASGKFDENSQVSVAPGWMTIDGHTIHDVARRDVLTMTGVLINSSNIGMSKVALQIGPKPILEQLGRVGFGAPLSLGFPGENPGYLPFHEKWSNIATASMSFGYSLAVNTAELAQAYSVFANDGKLVPLSLLRDNPQNQVRQAMDPQIARRIRAMLQTVVEDPKGVVRARVPGYHVAGKSGTARKASGRGYADKSYRSLFVGMAPASDPQLVLAVMIDSPTRIGYFGGLVSAPTFSDIMAGSLRALAIPPDNLQDSPAVADRQHHG

SEQ ID NO: 11868 - protein, 249 aa, Pseudomonas aeruginosa
MGKLLPLSPVPLYSQLKELLRGRILDGVYPPLSRMPSENELGKAFDVSRITVRQALGDLQKEGLIFKIHGKGTFVARPKAFQNVSTLQGLGESMTQMGYEVINRLHGLRYVPAGARVAERLRVEEGSPVCEIKRVRLVNREPVSLEVTYLPQALGERLEKADLVTRDIFLILENDCGIPLGHADLAIDAVLADADLTRALAVEEGAPIMRIERLTHAADGAPLDFEYLYYRGDAFQYRLRIDRQKGERA

SEQ ID NO: 11869 - protein, 663 aa, Pseudomonas aeruginosa
MENATQPVPLIELRDIRKRYGGNGTPEVEVLKGVSLSIHAGEFVAIVGASGSGKSTLMNILGCLDRPSSGSYHFAGHDVAELDSDEQAWLRREAFGFVFQGYHLIPSASAQENVEMPAIYAGIPASERHTRARALLERLGLAERTANRPHQLSGGQQQRVSIARALMNGGHIILADEPTGALDSHSGAEVMALLDELASQGHVVILITHDRDVAARAKRIIEVRDGEIVSDSANDERPAHPSAGVERHLQADDLSQRLAEGSSEPSGAWRAELLEAVRAAWRVMWINRFRTALTLLGIIIGVASVVVMLAVGEGSKRQVMAQMGAFGSNIIYLSGYSPNPRAPMGIVSSDDVAAIATLPQVKKVMPVNGGELVVRYGNIDYHAYVGGNNTDFPEILNWPVAEGSYFTERDEDAATTVAVIGYKVRKKLFGSANPIGRYILIENVPFQVIGVLAEKGSSSGDKDADNRIAIPYSAASIRLFGTRNPEYVIIAAADAQRVHQAERAIDQLMLRLHRGQRDYELTNNAAMIQAEAKTQNTLSLMLGSIAAISLLVGGIGVMNIMLMTVRERTREIGIRMATGARQGDILRQFLTEAAMLSVVGGLAGIALALCIGGVLLLGQVAVAFSLSAIVGAFSCALVTGLVFGFMPARKAAQLDPVAALASQ

SEQ ID NO: 11870 - protein, 2448 aa, Pseudomonas aeruginosa
MQALIEKVGSLSPQERKALAVLLKQQGVNLFEIAPVFKRQDGEPLRLSYAQERQWFLWQLEPESAAYHIPSVLRLRGRLDLDALQRSFDSLVARHETLRTRFRLDGDEARQEIAASMALPLDIVALGPLEEGALARQVETTIARPFDLERGPLLRVSLLRLAEDDHVLVLVQHHIVSDGWSMQVMVEELVQLYAAYSRGLEVALPALPIQYADYALWQRSWMEAGEKERQLAYWTGLLGGEQPVLELPFDRPRPVRQSHRGAQFILELDIDLSQALRRVAQQEGATAFALLLASFQALLYRYSGQADIRVGVPIANRNRVETERLIGFFVNTQVLKADLDGRMGFDELLAQARQRALEAQAHQDLPFEQLVEALQPERSLSHNPLFQVLFNYQSEARGNGQAFRFDELQMESVQFDSRTAQFDLTLDLTDEEQRFCAVFDYATDLFDASTVERLAGHWRNLLRGIVANPRQRLGELPLLDAPERRQTLSEWNPAQRECAVQGTLQQRFEEQARQRPQAVALILDEQRLSYGELNARANRLAHCLIARGVGADVPVGLALERSLDMLVGLLAILKAGGAYLPLDPAAPEERLAHILDDSGVRLLLTQGHLLERLPRQAGVEVLAIDGLVLDGYAESDPLPTLSADNLAYVIYTSGSTGKPKGTLLTHRNALRLFSATEAWFGFDERDVWTLFHSYAFDFSVWEIFGALLYGGCLVIVPQWVSRSPEDFYRLLCREGVTVLNQTPSAFKQLMAVACSADMATQQPALRYVIFGGEALDLQSLRPWFQRFGDRQPQLVNMYGITETTVHVTYRPVSEADLEGGLVSPIGGTIPDLSWYILDRDLNPVPRGAVGELYIGRAGLARGYLRRPGLSATRFVPNPFPGGAGERLYRTGDLARFQADGNIEYIGRIDHQVKVRGFRIELGEIEAALAGLAGVRDAVVLAHDGVGGTQLVGYVVADSAEDAERLRESLRESLKRHLPDYMVPAHLMLLERMPLTVNGKLDRQALPQPDASLSQQAYRAPGSELEQRIAAIWSEILGVERVGLDDNFFELGGHSLLATRVISRVRQEQQLDASLKALFERPVLEAFAQGLERTTDAVSTIPLADRQQPLALSFAQERQWFLWQLEPESAAYHIPSALRLRGRLDVDALQRSFDSLVARHETLRTRFRLEGGRSYQQVQPAVSVSIEREQFGEEGLIERIQAIVVQPFDLERGPLLRVNLLQLAEDDHVLVLVQHHIVSDGWSMQVMVEELVQLYAAYSQGLDVVLPALPIQYADYALWQRSWMEAGEKERQLAYWTGLLGGEQPVLELPFDRPRPARQSHRGAQLGFELSRELVEAVRALAQREGASSFMLLLASFQALLYRYSGQADIRVGVPIANRNRVETERLIGFFVNTQVLKADLDGRMGFDELLAQARQRALEAQAHQDLPFEQLVEALQPERNASHNPLFQVLFNHQSEIRSVTPEVQLEDLRLEGLAWDGQTAQFDLTLDIQEDENGIWASFDYATDLFDASTVERLAGHWRNLLRGIVANPRQRLGELPLLDAPERRQTLSEWNPAQRECAVQGTLQQRFEEQARQRPQAVALILDEQRLSYGELNARANRLAHCLIARGVGADVPVGLALERSLDMLVGLLAILKAGGAYLPLDPAAPEERLAHILDDSGVRLLLTQGHLLERLPRQAGVEVLAIDGLVLDGYAESDPLPTLSADNLAYVIYTSGSTGKPKGTLLTHRNALRLFSATEAWFGFDERDVWTLFHSYAFDFSVWEIFGALLYGGRLVIVPQWVSRSPEDFYRLLCREGVTVLNQTPSAFKQLMAVACSADMATQQPALRYVIFGGEALDLQSLRPWFQRFGDRQPQLVNMYGITETTVHVTYRPVSEADLKGGLVSPIGGTIPDLSWYILDRDLNPVPRGAVGELYIGRAGLARGYLRRPGLSATRFVPNPFPGGAGERLYRTGDLARFQADGNIEYIGRIDHQVKVRGFRIELGEIEAALAGLAGVRDAVVLAHDGVGGTQLVGYVVADSAEDAERLRESLRESLKRHLPDYMVPAHLMLLERMPLTVNGKLDRQALPQPDASLSQQAYRAPGSELEQRIAAIWAEILGVERVGLDDNFFELGGHSLLLLMLKERIGDTCQATLSISQLMTHASVAEQAACIEGQARESLLVPLNGRREGSPLFMFHPSFGSVHCYKTLAMALRDRHPVKGVVCRALLGAGREVPEWDDMVAEYAEQLLQEHPEGVFNLAGWSLGGNLAMDVAARLEQRGRQVAFVGWIDAPAPVRVEAFWNEIGPTPEAVPNLSVGEMRVELLGVMFPERAEHIERAWSSICSATTDDEQRWTRMSDWAEAEIGAEFATLRSEIAQSNELEVSWELKQILDERLKAMDYPRLTAKVSLWWAARSTNAIQRSAVERSMAEAIGAERVEPVRVLDTRHDKIIDHPEFVQSFRAALERAGR

SEQ ID NO: 11871 - protein, 333 aa, Pseudomonas aeruginosa
MTTLADIPLSMLDLVPVRTGGSVAEALHNSLDLARHVERLGFNRFWLAEHHNMDGIASSATALLIGHIAGGTSRIRVGSGGVMLPNHAPLVVAENFGTLETLYPGRIDLGLGRAPGADQATMRALRRDRLGNGDDFPEQVAELEMLLGPRRSQQSLLAVPGEGTQVPIWLLGSSLFSAHLAAQKGLPYAFASHFAPRYLHEALRIYRSNFQPSAVLDKPYAMIGVPLIAAPTDEEAEFLATTAFQRVLALIRGESLKQKPPVESMAPLWLPHEQDAVGSFFGLAVIGGPEKVRARLEILLEQTGADELIFTSDFYEHAHRLRSCEIVAELKGA

SEQ ID NO: 11872 - protein, 331 aa, Pseudomonas aeruginosa
MKTRQLGHNGPSVSAIGLGCMGMTDFYTTGGDRQEAIATLHRAVELGLNFFDTADMYGPHSNEELLGEALRGKREQVFLASKFGIVRDPANPRARGVDGSPAYIRRAIEGSLKRLGTDRLDLYYQHRMDPQVPIEDSVGALADLVKAGKIRHIGLSEASAETLERAHRVHPISALQSEYSLWTRDPEDTGVLAACRRLGIAFVPYSPLGRGFLTGTLKRPEDFAADDYRRFSPRFQGENFAKNLKLVDKVGELAAAKGVKPSQLALAWVLAQGDDLIPIPGTKQRRYLEENVAATELRLSAAELAELDAIFPAEAVAGSRYSEEGMRLVNL

SEQ ID NO: 11873 - protein, 311 aa, Pseudomonas aeruginosa
MNEQTWMLFGGIGALLLLASLVGFVLKWRAGPGPNAVIDNLNARINAWWAMVLVIGFAFWLGQAAVILLFYGVSFYALREFITLTPTRRSDYPALVAAFYFVLPMQYLLIYIDWYSMFSIFIPVYVFLLLPILASLGGDTKHFLERASKVQWGLMLAVFCISFVPALLTLDIPGFEGRNLLLIAYLVIVVQLSDVMQYICGKLFGKRKIAPNLSPSKTVEGFVGGIALATAIGASLWWITPFNLWQAALIALLINLLGFFGGLVMSAIKRDRGVKDWGHMIEGHGGMLDRLDSVCFAAPIFFHVVRYWWTP

SEQ ID NO: 11874 - protein, 465 aa, Pseudomonas aeruginosa
MDFLPLFHSLQGRLALVVGGGEVALRKARLLADAGARLRVVAPQIHIELRHLVEQGGGELLERDYQDGDQPGCALIIAATDDEPLNAEVSRAANARGIPVNVVDAPALCSVIFPAIVDRSPLVVAVSSGGDAPVLARLIRAKLETWIPSTYGQLAGLASRFRHRVKELLPDLQQRRVFWENLFQGEIAERVLAGRPAEAERLLEEHLAGGLAHIATGEVYLVGAGPGDPDLLTFRALRLMQQADVVLYDRLVAPSILELCRRDAERLYVGKRRAEHAVPQDRINRLLVELASQGKRVLRLKGGDPFIFGRGGEEIDELAAHGIPFQVVPGITAASGCAAYAGIPLTHRDHAQSVRFVTGHLKDGTTDLPWQDLVAPGQTLVFYMGLVGLPVICEQLVAHGRSAQTPAALIQQGTTAQQRVFTGTLENLPQLVAEHEVHAPTLVIVGEVVQLRDKLAWFEGAREDA

SEQ ID NO: 11875 - protein, 811 aa, Pseudomonas aeruginosa
MRRKNSDLKDSTTASHAAAWRQQLHSRLKEGVLIALGALCLYLWMALLTYDSADPSWSHSSQVDQVQNAAGRLGAVSADILFMTLGYFAYLFPLLLGIKTWQVFRRRNLPWEWNTWLFSWRLVGLIFLILAGSALAYIHFHASGHMPASASAGGAIGQSLGRVAVDALNVQGSTLVFFALFLFGLTVFADLSWFKVMDVTGKITLDFFELIQNAFNRWMGARAERKQLVAQLREVDERVAEVVAPSVPDRREQSKAKERLLEREEALAKHMSEREKRPPPKIDPPPSPKAPEPSKRVLKEKQAPLFVDTAVEGTLPPLSLLDPAEVKQKSYSPESLEAMSRLLEIKLKEFGVEVSVDSVHPGPVITRFEIQPAAGVKVSRISNLAKDLARSLAVISVRVVEVIPGKTTVGIEIPNEDRQMVRFSEVLSSPEYDEHKSTVPLALGHDIGGRPIITDLAKMPHLLVAGTTGSGKSVGVNAMLLSILFKSTPSEARLIMIDPKMLELSIYEGIPHLLCPVVTDMKEAANALRWSVAEMERRYRLMAAMGVRNLAGFNRKVKDAEEAGTPLTDPLFRRESPDDEPPQLSTLPTIVVVVDEFADMMMIVGKKVEELIARIAQKARAAGIHLILATQRPSVDVITGLIKANIPTRIAFQVSSKIDSRTILDQGGAEQLLGHGDMLYLPPGTGLPIRVHGAFVSDDEVHRVVEAWKLRGAPDYIEDILAGVDEGGGGGGSFDGGDGSGEGSEDDPLYDEAVRFVTESRRASISAVQRKLKIGYNRAARMIEAMEMAGVVTPMNTNGSREVIAPAPVRD

SEQ ID NO: 11876 - protein, 72 aa, Pseudomonas aeruginosa
MSKEDSFEMEGTVVDTLPNTMFRVELENGHVVTAHISGKMRKNYIRILTGDKVRVELTPYDLSKGRITYRAR

SEQ ID NO: 11877 - protein, 418 aa, Pseudomonas aeruginosa
MGYQKIQVPATGDKITVNADMSLSVPKNPIIPFIEGDGIGVDISPVMIKVVDAAVEKAYKGERKIAWMEVYAGEKATQVYDQDTWLPQETLDAVRDYVVSIKGPLTTPVGGGIRSLNVALRQQLDLYVCQRPVRWFEGVPSPVKKPGDVDMVIFRENSEDIYAGVEWKAGSPEAEKVIKFLTEEMGVKKIRFTENCGIGIKPVSQEGTKRLVRKALQYAVDNDRSSVTLVHKGNIMKFTEGAFKDWGYEVARDEFGAELLDGGPWMQFKNPKTGKNVVVKDVIADAMLQQILLRPAEYDVIATLNLNGDYLSDALAAEVGGIGIAPGANLSDSVAMFEATHGTAPKYAGQDKVNPGSLILSAEMMLRHMGWTEAADLIIKGTNGAIAAKTVTYDFERLMDGATLLSCSEFGDAMIAKM

SEQ ID NO: 11878 - protein, 375 aa, Pseudomonas aeruginosa
MSESAPTPRRERVIVGMSGGVDSSVSALLLLQQGYQVEGLFMKNWDEDDGTEYCTAREDLADAQAVCDRIGIKLHTANFAAEYWDNVFEHFLAEYKAGRTPNPDILCNREIKFKAFLDYALMLGADLIATGHYVRRRDRDGRTELLKGLDPNKDQSYFLHAVGGEQIARSLFPVGELEKPEVRAIAEKHGLATAKKKDSTGICFIGERRFTDFLKQYLPAQPGDIETTEGKVIGRHSGLMYHTIGQRQGLGIGGLKEAGDDPWYVLGKDLQRNVLLVGQGNDHPLLFSRALLASRIYWVNPVELERPRRLRAKVRYRQSDQDCVLEKTAEGYRAVFDEPQRAVTPGQSVVFYDGDVCLGGGVIETAEAWDFGGRP

SEQ ID NO: 11879 - protein, 324 aa, Pseudomonas aeruginosa
MSRIFADNAQSIGNTPLVQINRIAPRGVTILAKIEGRNPGYSVKCRIGANMIWDAEASGRLKSGMTLVEPTSGNTGIGLAFVAAARGYKLILTMPASMSLERRKVLKALGAELVLTEPAKGMKGAIQKAEELVAGDPGKYFMPQQFDNPANPAIHEKTTGPEIWNDTEGAVDVLVSGVGTGGTLTGVSRYIKNTRGKPILAVAVEPVTSPVISQTLAGEEVKPAPHKIQGIGAGFVPKNLDLSLVDRVEKIGDDEAKNMALRLMQEEGILCGISSGAAMAAAVRLAEEPNMQGKTIVVILPDSGERYLSSMLFDGLFSEQELTQ

SEQ ID NO: 11880 - protein, 792 aa, Pseudomonas aeruginosa
MKFSEKWLRSWANPQVSHDELVARLSMVGLEVDADLPVAGAFSGVVVGEVLSTEQHPDADKLRVCQVSNGSETFQVVCGAPNVRAGLKIPFAMIGAELPDDFKIKKAKLRGVESFGMLCSAKELQISEENAGLLELPADAPVGQDVRTYLELADYTIEVGLTPNRGDCLSLAGLAREVSAIYDVPLAPVAVDAVAAQHDETRPVELAAPAACPRYLGRVIRNVDLSRPTPLWMVERLRRSDIRSIDPVVDVTNYVMIELGQPMHAFDLAEINGGVRVRMAEDGEKLVLLDGQEITLRADTLVIADHQRALAIAGVMGGEHSGVSDSTRDLFLEAAFFDTIALAGKARSYGLHTDSSHRFERGVDSQLARKAMERATRLILDIVGGEPGPIVEQVSEAHLPKVAPITLRAERVTQMLGMPLDAAEIVRLLQALELTVVADGEGQWSVGVPSHRFDISLEVDLIEELARLYGYNRLPVRYPQARLAPNNKPEARAALPLLRRLLVARGYQEAITFSFIDPALFELFDPGTQPLTLANPISADMAAMRSSLWPGLVKALQHNLNRQQSRVRLFESGLRFVGQLEGLKQEAMLAGAICGKRLPEGWANGRDGVDFFDAKADVEAVLASAGALGDFSFVPGEHPALHPGQTARIEREGRLVGYLGALHPELAKKLDLEQPVFLFELLLAEVVDGHLPKFRELSRFPEVRRDLALLVDQDVPAQDILTQIRAAAGEWLTDLRLFDVYHGKGIDPHRKSLAVGLTWQHPSRTLNDDEVNSTTQNIVTSLEERFNATLRK

SEQ ID NO: 11881 - protein, 338 aa, Pseudomonas aeruginosa
MENLDALVSQALEAVRHTEDVNALEQIRVHYLGKKGELTQVMKTLGDLPAEERPKVGALINVAKEKVQDVLNARKTELEGAALAARLAAERIDVTLPGRGQLSGGLHPVTRTLERIEQCFSRIGYEVAEGPEVEDDYHNFEALNIPGHHPARAMHDTFYFNANMLLRTHTSPVQVRTMESQQPPIRIVCPGRVYRCDSDLTHSPMFHQVEGLLVDEGVSFADLKGTIEEFLRAFFEKQLEVRFRPSFFPFTEPSAEVDIQCVICSGNGCRVCKQTGWLEVMGCGMVHPNVLRMSNIDPEKFQGFAFGMGAERLAMLRYGVNDLRLFFDNDLRFLGQFR

SEQ ID NO: 11882 - protein, 118 aa, Pseudomonas aeruginosa
MARVKRGVIARRRHKKILKLAKGYYGARSRVFRVAKQAVIKAGQYAYRDRRQRKRQFRALWIARINAGARQNGLSYSRLIAGLKKAAIEIDRKVLADLAVNEKAAFTAIVEKAKASLA

SEQ ID NO: 11883 - protein, 183 aa, Pseudomonas aeruginosa
MIIKREMRQDKRAQPKPPINENISAREVRLIGADGQQVGVVSIDEAIRLAEEAKLDLVEISADAVPPVCRIMDYGKHLFEKKKQAAVAKKNQKQAQVKEIKFRPGTEEGDYQVKLRNLVRFLSEGDKAKVSLRFRGREMAHQELGMELLKRVEADLVEYGTVEQHPKLEGRQLMMVIAPKKKK

SEQ ID NO: 11884 - protein, 640 aa, Pseudomonas aeruginosa
MPIITLPDGSQRSFDHPVSVAEVAQSIGAGLAKATLAGKVDGRLVDACDTIDRDATLQIITPKDEEGLEIIRHSCAHLVGHAVKQLYPTAKMVIGPVIEEGFYYDIFFERPFTPEDMAAIQQRMRELIDKDYDVIKKMTPRAEVIELFKSRGEDYKLRLIDDMPDEKAMGLYFHEEYVDMCRGPHVPNTRFLKAFQLTKISGAYWRGDSKNEQLQRIYGTAWADKKQLAAYIQRIEEAEKRDHRRIGKQLDLFHLQEEAPGMVFWHPNGWSVYQVLEQYMRKVQRDHGYVEVRTPQVVDRILWERSGHWSNYAENMFTTSSESRDYAVKPMNCPCHVQIFNQGLKSYRDLPLRLAEFGACHRNEPSGALHGIMRVRGFTQDDAHIFCTEEQVKKEAADFIKLTLQVYRDFGFTDIAMKLSTRPAKRVGSDELWDRAEGALADALNESGLAWEYQPGEGAFYGPKIEFTLKDCLGRNWQCGTLQYDPNLPERLDASYIAEDNNRKRPVMLHRAILGSFERFIGMLIEHYAGAFPAWLAPTQAVVMNITDKQADFAAEVVRILGESGFRAKSDLRNEKIGFKIREHTLLKVPYLLVIGDREVESKAVAVRTREGEDLGSMPVTQFAELLAQAVSRRGRQDSE

SEQ ID NO: 11885 - protein, 567 aa, Pseudomonas aeruginosa
MGLCGCIRGKPMTQETVGFAALGIHPNVLAAIVAVGYEEPSPIQAQSIPLILEGHDMIGQAQTGTGKTAAFALPLLSRIDPSRREPQMLVLVPTRELALQVATACETYSKQLPGVGVVAVYGGAPMGPQLKALRQGAQILVATPGRLCDHLRRDEKLLATVQRLVLDEADEMLKLGFMDDLEVIFEALPESRQTVLFSATLPASIRGIAERHLKQPKHVKIAAKTQTVARIEQVHLMVHADQKAGSIQRLLEVEQFDALIAFVRTKQATLDYAELLERQGYRAAALNGDMPQAQRERVIESLKDGSLDIVIATDVAARGLDVPRITHVLNIDMPYDPESYVHRIGRTGRAGREGRALLLVTPRERRMLQVIERVTGQKVGEVRLPDAETVLEARLARLAASLTPLLDSAVEQRGAVRDELCRRLGCDAETLAAALLARLTAGKALDLESVRREQPLTPSAPRERADRGERGERPERSGERRPMAPPSEGRARCRTALGARDGVAAKNLLGAILNEGGLSREDIGRIQIRDTFSLIELPEANLERLLTKLKDTRVAGKALRLRRYRED

SEQ ID NO: 11886 - protein, 311 aa, Pseudomonas aeruginosa
MKKKSLLPLGLAIGLASLAASPLIQASTYTQTKYPIVLAHGMLGFDNILGVDYWFGIPSALRRDGAQVYVTEVSQLDTSEVRGEQLLQQVEEIVALSGQPKVNLIGHSHGGPTIRYVAAVRPDLIASATSVGAPHKGSDTADFLRQIPPGSAGEAVLSGLVNSLGALISFLSSGSTGTQNSLGSLESLNSEGAARFNAKYPQGIPTSACGEGAYKVNGVSYYSWSGSSPLTNFLDPSDAFLGASSLTFKNGTANDGLVGTCSSHLGMVIRDNYRMNHLDEVNQVFGLTSLFETSPVSVYRQHANRLKNASL

SEQ ID NO: 11887 - protein, 343 aa, Pseudomonas aeruginosa
MTLFRSPRAYCLLLGSLVMLLGLSCVVALGFGPARLDSGLVGRIVLQRLFGVAAEPGAWSAGQEHIVWLIRAPRVLLGACVGAGLALVGAALQAVTRNPLADPHLLGATSGATLGAVLVVLYIGEVIGLLTLPLAAFLGALGSMLLVLGVASRGGRLGSDRLLLAGVAVSFVLLALANLLLFLGDHRAASSVLFWMLGGLGLARWSLIWLPALCVAGGLLVLLGLGRALNALMAGEQTAVTLGLDARRVRLWVFICCSLLTGVLVSVSGAIGFVGLMLPHAARLLVGAEHRRLLPVCALLGALFLVWMDVAARTLIAPQDLPIGIATAAIGGLFFILLLRRRS

SEQ ID NO: 11888 - protein, 255 aa, Pseudomonas aeruginosa
MYSLQVEDIHKRYGSHEVLRGVSLRAGKGDVISIIGSSGSGKSTFLRCVNFLEKPCAGHIRVGDEELRTRPGALGELRAADPRQLQRIRSRLAMVFQHFNLWSHLTVLENVVECPVNVLRMNRDDAVARARHYLAKVGLAEKVERQYPCELSGGQQQRVAIARALAMEPQVMLFDEPTSALDPELVGEVLKVMQQLAEEGRTMVLVTHEMAFARQVSSHVIFLHQGVIEEEGTPDQVFGAPRSERLRQFLAGNLK

SEQ ID NO: 11889 - protein, 258 aa, Pseudomonas aeruginosa
MLVDSHCHLDRLDLAAHGGSLDAALDAARARGVGQFLCIGVSADNAQAVKALAERYADVHCSVGVHPLDLEPGSAPALDWLLGELAHPRVVAIGETGLDYHYEPEAAELQQEAFRLHLEAARITAKPVIVHTREARADTLALLREAALPQAGVLHCFTEDWEMARSALDLGFYISLSGIVTFRNADALREVARQVPADRLLVETDSPYLAPIPHRGKPNLPEYVRDVAEFLATLRGVSLETLAEQTTANFHRLFPLAR

SEQ ID NO: 11890 - protein, 210 aa, Pseudomonas aeruginosa [sequence omitted]

SEQ ID NO: 11891 - protein, 414 aa, Pseudomonas aeruginosa
MSRRRVVITGMGMLSPLGLDVPSSWEGILAGRSGIAPIEHMDLSAYSTRFGGSVKGFNVEEYLSAKEARKLDLFIQYGLAASFQAVRDSGLEVTDANRERIGVSMGSGIGGLTNIENNCRSLFEQGPRRISPFFVPGSIINMVSGFLSIHLGLQGPNYALTTACTTGTHSIGMAARNIAYGEADVMVAGGSEMAACGLGLGGFGAARALSTRNDEPTRASRPWDRDRDGFVLSDGSGALVLEELEHARARGARIYAELVGFGMSGDAFHMTAPPEDGAGAARCMKNALRDAGLDPRQVDYINAHGTSTPAGDIAEIAAVKSVFGEHAHALSMSSTKSMTGHLLGAAGAVEAIFSVLALRDQVAPPTINLDNPDEGCDLDLVAHEAKPRKIDVALSNSFGFGGTNGTLVFRRFAD

SEQ ID NO: 11892 - protein, 78 aa, Pseudomonas aeruginosa
MSTIEERVKKIVAEQLGVKEEEVTNSASFVEDLGADSLDTVELVMALEEEFETEIPDEKAEKITTVQEAIDYIVAHQQ

SEQ ID NO: 11893 - protein, 247 aa, Pseudomonas aeruginosa
MSLQGKVALVTGASRGIGQAIALELGRLGAVVIGTATSASGAEKIAETLKANGVEGAGLVLDVSSDESVAATLEHIQQHLGQPLIVVNNAGITRDNLLVRMKDDEWFDVVNTNLNSLYRLSKAVLRGMTKARWGRIINIGSVVGAMGNAGQTNYAAAKAGLEGFTRALAREVGSRAITVNAVAPGFIDTDMTRELPEAQREALLGQIPLGRLGQAEEIAKVVGFLASDGAAYVTGATVPVNGGMYMS

SEQ ID NO: 11894 - protein, 312 aa, Pseudomonas aeruginosa
MSASLAFVFPGQGSQSLGMLAELGAQQALVRDTFAEASEALGYDLWALVQNGPEERLNQTDKTQPAILTVSIALWRLWLAEGGARPAFVAGHSLGEYSALVAAESLAFADAVKLVERRGQLMQQAVPAGQGGMAAILGLEDADVLAACAEAAQGEVVSAVNFNAPGQVVIAGAAAAVERAIEACKARGAKRAVALPVSVPSHCELMRPAAEQFAASVESLQWQAPKISLVQNVSAAVPADLDTLRRDLLAQLYSPVRWVESIQLLAEKGVTELVECGPGKVLAGLNRRCAKGINTHGLDGVEAFAATRAALA

SEQ ID NO: 11895 - protein, 1148 aa, Pseudomonas aeruginosa
MSVLRLPSLPASAGKQHWGNLPGAALSLAVAEAASSAKRFTLLLTADSQNAERLEQELRFFAPDLPVLHFPDWETLPYDVFSPHQDIISQRIAALYQLPQLKHGVLVVPISTALHRLAPTRFLLGSSLVLDVGQKLDVERMRLRLEGAGYRCVDTVYEHGEFAVRGALIDLFPMGSELPFRIDLFDDEIETLRTFDPETQRSIDKVESIRLLPAREFPLNKEAVTGFRGRFRERFDVDYRRCPIYQDLASGLTPSGIEYYLPLFFEETATLFDYLPQDTQVFSLPGIEQAAEQFWNDVRSRYEDRRVDPERPLLPPAEVFLPVEDCFARLKNWPRVVASQEDVEPGVGRERFPALPLPNLAIEAKAAEPLAALRRFIEEFPGRVLFCAESAGRREVLLELLARLKLRPEEVDGWPAFLASQARLAISIAPLDEGLLLDHPALALVAESPLFGQRVMQRRRREKTRDGGDAVIKNLTELREGAPVVHIDHGVGRYLGLITLEVDNQQAEFLMLQYAEDAKLYVPVANLHLIARYTGADDALAPLHRLGSETWQKAKRKAAEQVRDVAAELLDIYARRAAREGFAFKDPQADYATFSAGFPFEETPDQQSAIEAVVADMLAPRPMDRLVCGDVGFGKTEVAMRAAFVAVHSGKQVAVLVPTTLLAQQHYNSFRDRFADWPVSVEVMSRFKSAKEVENAARLLAEGKIDILIGTHKLLQEDVKFANLGLVVIDEEHRFGVRQKEQLKALRSEVDILTLTATPIPRTLNMAVSGMRDLSIIATPPARRLSVRTFVMEQQNAVIKEALLRELLRGGQVYYLHNEVKTIEKCARDLAELVPEARIGIGHGQMHERELEQVMSDFYHKRFNVLVASTIIETGIDVPSANTILIERADKFGLAQLHQLRGRVGRSHHQAYAYLLTPPRRQMTPDAEKRLEAIANAQDLGAGFVLATHDLEIRGAGELLGDGQSGQIQAVGFTLYMEMLERAVKAIRKGEQPNLEQPLGGGPEVNLRVPALIPEDYLPDVHARLILYKRIANAPDEEGLRELQVEMIDRFGLLPDPAKNLMRLTLLKLQAEKLGILKVDAGPQGGRIEFAADTQVDPLVLIKLIQGQPNRYKFEGATLFRFQVPMERPEERFNTLEALFERLTPQTT

SEQ ID NO: 11896 - protein, 302 aa, Pseudomonas aeruginosa
MDKDKVLLVLHGKQAGNEEVRAAVAAQREAGRELAVRVTWEDGDARRIVEEALAAGYATLVAGGGDGTLREVAEALARGRGEASLAILPLGTANDFARAAGIPLEPAAALALLDQTARPIDLGEVNGKLFLNMATGGFGSKVTANTSEDLKKVLGGAAYLLTGLTRFSEVHAAQGRFSAPDFQWEGEFLALGIGNGRQAGGGHVLCPQARVDDGLLDVSILPTPQDMVGTLGTLLGGGNGVESLFVRARVPWLEVEAAEGLDVNLDGEPLEGRKLRFSVSPGALRVHLPAGSPLLREPPRED

SEQ ID NO: 11897 - protein, 179 aa, Pseudomonas aeruginosa
MSHKAETAFVPLNIAVLTVSDTRTLETDTSGQLFVDRLTEAGHNLAARVLLKDDLYRIRAQVATWIAEDSVQVVLITGGTGFTGRDSTPEAVACLLDKQVDGFGELFRQISLADIGTSTIQSRALAGLSNGTLVCCLPGSTNACRTAWEGILVEQLDARHRPCNFVPHLKQAAPCESRG

SEQ ID NO: 11898 - protein, 290 aa, Pseudomonas aeruginosa
MSNWLVDKLIPSIMRSESQKSSVPEGLWHKCPSCEAVLYRPELEKTLDVCPKCDHHMRINARTRLDIFLDEDGREELGADLEPVDRLKFRDSKKYKDRLAAAQKDTGEKDALIAMSGKLQGMPVVACAFEFSFMGGSMGAIVGERFVRAANVALEKRCPLICFSASGGARMQEALISLMQMAKTSAVLARLREEGIPFVSVLTDPVYGGVSASLAMLGDVIVGEPKALIGFAGPRVIEQTVREKLPEGFQRSEFLLEHGAIDMIVHRAELRPRLANLLSAFTHSPSPVSA

SEQ ID NO: 11899 - protein, 336 aa, Pseudomonas aeruginosa
MSQPLNVAVVGATGSVGEALVGLLDERDFPLHRLHLLASAESAGQRMGFAESSLRVGDVDSFDFSSVGLAFFAAAAEVSRAHAERARAAGCSVIDLSGALEPSVAPPVMVSVNAERLASQAAPFLLSSPCAVAAELCEVLAPLLATLDCRQLNLTACLSVSSLGREGVKELARQTAELLNARPLEPRLFDRQIAFNLLAQVGAVDAEGHSAIERRIFAEVQALLGERIGPLNVTCIQAPVFFGDSLSVTLQCAEPVDLAAVTRVLDATKGIEWVGEGDYPTVVGDALGQDETYVGRVRAGQADPCQVNLWIVSDNVRKGAALNAVLLGELLIKHYL

SEQ ID NO: 11900 - protein, 212 aa, Pseudomonas aeruginosa
MKPYTQTTGLVAPLDRANVDTDQIIPKQFLKSIKRTGFGPNLFDEWRYLDVGQPGQDNSKRPLNPDFVLNQPRYQGASVLLARENFGCGSSREHAPWALDEYGFRTVIAPSYADIFFNNSFKNGLLPIILPEAEVDELFRQVEANEGYQLSIDLAAQTVTRPDGKVLGFEVDPFRKHCLLNGLDDIGLTLQDADAIRAFEDGYRQQQPWLFR

SEQ ID NO: 11901 - protein, 494 aa, Pseudomonas aeruginosa
MTTVRTRIAPSPTGDPHVGTAYIALFNLCFARQHGGQFILRIEDTDQLRSTRESEQQIYDALRWLGIEWDEGPDVGGPHGPYRQSERGHIYKKYSDELVEKGHAFTCFCTPERLDAVRAEQMARKETPRYDGHCMHLPKDEVQRRLAAGESHVTRMKVPTEGVCVVPDMLRGDVEIPWDRMDMQVLMKADGLPTYFLANVVDDHLMGITHVLRGEEWLPSAPKLIKLYEYFGWEQPQLCYMPLLRNPDKSKLSKRKNPTSITFYERMGYLPQALLNYLGRMGWSMPDEREKFTLAEMIEHFDLSRVSLGGPIFDLEKLSWLNGQWIREQSVEEFAREVQKWALNPEYLMKIAPHVQGRVENFSQIAPLAGFFFSGGVPLDASLFEHKKLDPTQVRQVLQLVLWKLESLRQWEKERITGCIQAVAEHLQLKLRDVMPLMFPAITGHASSVSVLDAMEILGADLSRYRLRQALELLGGASKKETKEWEKIRDAIPG

SEQ ID NO: 11902 - protein, 665 aa, Pseudomonas aeruginosa
MLDNLRIKLLGLPRRYKRMLQVAADVTLVWLSLWLAFLVRLGTEDMISPFSGHAWLFIAAPLVAIPLFIRFGMYRAVMRYLGNDALIAIAKAVTISALVLSLLVYWYRSPPAVVPRSLVFNYWWLSMLLIGGLRLAMRQYFMGDWYSAVQSVPFLNRQDGLPRVAIYGAGAAGNQLVAALRLGRAMRPVAFIDDDKQIANRVIAGLRVYTAKHIRQMIDETGAQEVLLAIPSATRARRREILESLEPFPLHVRSMPGFMDLASGRVKVDDLQEVDIADLLGRDSVAPRKELLERCIRGQVVMVTGAGGSIGSELCRQIMSCSPSVLILFEHSEYNLYSIHQELERRIKRESLSVNLLPILGSVRNPERLVDVMRTWKVNTVYHAAAYKHVPIVEHNIAEGVLNNVIGTLHAVQAAVQVGVQNFVLISTDKAVRPTNVMGSTKRLAEMVLQALSNESAPVLFGDRKDVHHVNKTRFTMVRFGNVLGSSGSVIPLFREQIKRGGPVTVTHPSITRYFMTIPEAAQLVIQAGSMGQGGDVFVLDMGPPVKILELAEKMIHLSGLSVRSERSPHGDIAIEFSGLRPGEKLYEELLIGDNVNPTDHPMIMRANEEHLSWEAFKVVLEQLLAAVEKDDYSRVRQLLRETVSGYAPDGEIVDWIYRQRRREP

SEQ ID NO: 11903 - protein, 354 aa, Pseudomonas aeruginosa
MKILTIIGARPQFIKASVVSKAIIEQQTLSEIIVHTGQHFDANMSEIFFEQLGIPKPDYQLDIHGGTHGQMTGRMLMEIEDVILKEKPHRVLVYGDTNSTLAGALAASKLHVPIAHIEAGLRSFNMRMPEEINRILTDQVSDILFCPTRVAIDNLKNEGFERKAAKIVNVGDVMQDSALFFAQRATSPIGLASQDGFILATLHRAENTDDPVRLTSIVEALNEIQINVAPVVLPLHPRTRGVIERLGLKLEVQVIDPVGYLEMIWLLQRSGLVLTDSGGVQKEAFFFGKPCVTMRDQTEWVELVTCGANVLVGAARDMIVESARTSLGKTIQDDGQLYGGGQASSRIAEYLAKL

SEQ ID NO: 11904 - protein, 559 aa, Pseudomonas aeruginosa
MSESFAELFEESLKSLDMQPGAIITGIVVDIDGDWVTVHAGLKSEGVIPVEQFYNEQGELTIKVGDEVHVALDAVEDGFGETKLSREKAKRAESWIVLEAAFAADEVVKGVINGKVKGGFTVDVNGIRAFLPGSLVDVRPVRDTTHLEGKELEFKVIKLDQKRNNVVVSRRSVLEAENSAEREALLESLQEGQQVKGIVKNLTDYGAFVDLGGVDGLLHITDMAWKRIKHPSEIVNVGDEIDVKVLKFDRERNRVSLGLKQLGEDPWVAIKARYPEGTRVMARVTNLTDYGCFAELEEGVEGLVHVSEMDWTNKNIHPSKVVQVGDEVEVQVLDIDEERRRISLGIKQCKSNPWEDFSSQFNKGDRISGTIKSITDFGIFIGLDGGIDGLVHLSDISWNEVGEEAVRRFKKGDELETVILSVDPERERISLGIKQLEDDPFSNYASLHEKGSIVRGTVKEVDAKGAVISLGDDIEGILKASEISRDRVEDARNVLKEGEEVEAKIISIDRKSRVISLSVKSKDVDDEKDAMKELRKQEVESAGPTTIGDLIRAQMENQG

SEQ ID NO: 11905 - protein, 923 aa, Pseudomonas aeruginosa
MGELAKEILPVNIEDELKQSYLDYAMSVIVGRALPDARDGLKPVHRRVLYAMSELGNDWNKPYKKSARVVGDVIGKYHPHGDTAVYDTIVRMAQPFSLRYMLVDGQGNFGSVDGDNAAAMRYTEVRMAKLAHELLADLEKETVDWVPNYDGTEQIPAVMPTKIPNLLVNGSSGIAVGMATNIPPHNLGEVIDGCLALMDNPDLTVDELMQYIPGPDFPTAGIINGRAGIIEAYRTGRGRIYIRARAVVEEMEKGGGREQIIITELPYQLNKARLIEKIAELVKEKKIEGISELRDESDKDGMRVVIELRRGEVGEVVLNNLYAQTQLQSVFGINVVALVDGQPRTLNLKDMLEVFVRHRREVVTRRTVYELRKARERGHILEGQAVALSNIDPVIELIKSSPTPAEAKERLIATAWESSAVEAMVERAGADACRPEDLDPQYGLRDGKYYLSPEQAQAILELRLHRLTGLEHEKLLSEYQEILNLIGELIRILTNPARLMEVIREELEAVKAEFGDARRTEIVASQVDLTIADLITEEDRVVTISHGGYAKSQPLAAYQAQRRGGKGKSATGMKDEDYIEHLLVANSHATLLLFSSKGKVYWLRTFEIPEASRTARGRPLVNLLPLDEGERITAMLQIDLEALQQNGGADDDLDEAEGAVLEGEVVEAAEVEEVEGETAELVAEPTGAYIFMATAFGTVKKTPLVQFSRPRSSGLIALKLEEGDTLIAAAITDGAKEVMLFSSAGKVIRFAESVVRIMGRNARGVRGMRLGKGQQLISMLIPESGAQILTASERGFGKRTPLSKFPRRGRGGQGVIAMVTNERNGALIAAVQVQEGEEIMLISDQGTLVRTRVDEVSLSGRNTQGVTLIKLASDEVLVGLERVQEPSGGDDEDLPEGEEAAESLGESAESESEPAAEAEGNEE

SEQ ID NO: 11906 - protein, 386 aa, Pseudomonas aeruginosa
MNDTPENPHVPVGEKLQKVLARLGVGSRRDVEVWIAEGRVNVNGSVASLGQRVDSHDAITVDGHLIRREEAAESVRRVLIYNKPEGEVCTRDDPEGRPTIFDRLPRLRTGRWINVGRLDINTTGLLLFTTDGELANRLMHPSYEMDREYAVRVRGEVTEEMIERLLNGVMLEDGPAKFSDIQQAPGGEGFNHWYHCVVMEGRNREVRRLWESQGLVVSRLKRVRFGPVFLTSELTMGRYREMDQREIDILSEEVGLKPVALPGMTTKAREKAERQQRKQARPLARSERPEAGRKRAPRREDGENAARRAPASRPARGPQPSAERKGREQGTPVAERPRESNRKPRPSKPRDERPASAPGDKPAARKPQVKRRPKPAGDGMRPGFRR

SEQ ID NO: 11907 - protein, 334 aa, Pseudomonas aeruginosa
MTIRLAINGFGRIGRNVLRALYTGHYREQLQVVAINDLGDAAVNAHLFQYDSVHGHFPGEVEHDAESLRVMGDRIAVSAIRNPAELPWKSLGVDIVLECTGLFTSRDKAAAHLQAGAGKVLISAPGKDVEATVVYGVNHEVLRASHRIVSNASCTTNCLAPVAQVLHRELGIEHGLMTTIHAYTNDQNLSDVYHPDLYRARSATQSMIPTKTGAAEAVGLVLPELAGKLTGLAVRVPVINVSLVDLTVQVARDTSVDEVNRLLREASEGSPVLGYNTQPLVSVDFNHDPRSSIFDANHTKVSGRLVKAMAWYDNEWGFSNRMLDSALALAAARD

SEQ ID NO: 11908 - protein, 186 aa, Pseudomonas aeruginosa
MEALDALLTRVSHARLSDPAPSPEQLDRLFRVALRAPDHGQLRPWRFILVEGEGRRALGDLYARALASRQPDAAEEALAKARNMPLRAPLLVVAVACLQDHPKVPHAEQLLAAGCAAHGLVLGAYAQGLGAMWRTGEMATDPVVHAGLGLGEQERIIGFVYLGTPMGELRTPAELDPTAFVSAWPG

SEQ ID NO: 11909 - protein, 331 aa, Pseudomonas aeruginosa
MSFVSVEQLDKSYGATSIFRDIDFAAARGEFVTLLGPSGCGKSTLLRCIAGLTEVDSGRILIDGEDVVPLPPQKRGIAMVFQSYALFPNMTVQQNVAFGLRMQKVPAAELKQRVAEAIELVELGEYAARYPHQLSGGQCQRVALARSLVTRPRLLLLDEPLSALDARIRKHLREQIRRIQQELGLTTVFVTHDQEEALTLSDRIVLMNAGRIVQSGDAETLYTAPENAFAAGFIGNYNLLDAEQASRLLGQSCAQQVAIRPESLRLGNEPSEGVPALVRSHSLLGNVIRYRVEAAGVELTVDVLNRSADRLYPAGSQLTLVIDRNSIREVA

SEQ ID NO: 11910 - protein, 476 aa, Pseudomonas aeruginosa
MTPGYPLALSLAVSMAVLGSALPAQARQDDPSLFNRQARGELSEYGGARRVEQDLTQALKQSLSKKKAKNVILLIGDGMGDSEITVARNYARGAGGYFKGIDALPLTGQYTHYSLHKDSGLPDYVTDSAASATAWSTGVKSYNGAIGVDIHEQPHRNLLELAKLNGKATGNVSTAELQDATPAALLAHVTARKCYGPEATSKQCPSNALENGGAGSITEQWLKTRPDVVLGGGAATFAETAKAGRYAGKTLRAQAEARGYRIVENLDELKAVRRANQKQPLIGLFAPGNMPVRWLGPTATYHGNLNQPAVSCEANPKRTADIPTLAQMTSKAIELLKDNPNGFFLQVEGASIDKQDHAANPCGQIGETVDLDEAVQKALAFAKADGETLVIVTADHAHSSQIIPPETAAPGLTQLLTTKDGAPLAISYGNSEESSQEHTGTQLRIAAYGPQAANVTGLTDQTDLFFTIRRALNLRD

SEQ ID NO: 11911 - protein, 316 aa, Pseudomonas aeruginosa
MPAAAYWLPASDETPLYTRHWPSATAVGAVMLSHGMAEHAGRYERLAAALNAAGYHFYAIDQRGHGRTAEADELGHFADQGGWGKVVGDLASLNHHIRQQHPELPIFLLGHSMGSYISMAYLLHHSCSLQGAILSGSNYQPQALYRIARLIARFERWRQGPLGKSALIDFLSFGSFNKAFKPNRTAFDWLSRDPQEVDRYVADPLCGFRCSNQLWVDLLGGLADITPPTHLRQIDADLPLLIIGGERDPVSQGKRLGDLADALRGAGLRQVTLKTYPEARHELFNESNRDAVTQDLIDWLEQALRHRRDHSTKERT

SEQ ID NO: 11912 - protein, 391 aa, Pseudomonas aeruginosa
MDLRLLLLSLTTFAAGLAESILIGILPPLAEDLRVSISLAGQLTTLFSLGFALAAPLLGWLTRRIERRRLLLATLLLFALSNALAALAPGYLGLLLARLGMSACCGLLIVLASLLAAELAAPAQRGRAIGLIFMGISGSLVFGVPLGVQISDWFGWRWIFAGIAVYSLPLCLLLWRYLPQRQAGDLPGREGYLRQLRQPALWLAQLVSILLLGGHFTLFAYFTPYLASMAGIRSPSEISLILLLIGLAALSGGYIGGWLADHLGHRRALRLVPAAFALALAAVPLSLGSIGFLPVLMVWSAISWMISPVVQSFLLRSDPASGSAGVALNTSAMHLGVGLGAALGGLVVAALGVAATPWVGLALVLAALACALGASTLDGATQALPFSPPAR

SEQ ID NO: 11913 - protein, 285 aa, Pseudomonas aeruginosa
MRASLRVVVTLLVVAAAVLAGIWLWRYYMLSPWTRDARVRADVVVVAPDVSGWVTDLEVKDNQVVKVGDVLMRIDQERYQANLEQARAVAETRHQQYLLRQNEAARRSRLGIGAISAEDKENAQINAAIARSEYQEALAQVKIAELNLKRSELRAARNGQVTNLRLAQGNYATAGQAVMALVDQQSFYVVAYFEETKLPGIRVGMRAQVRLMSGDQPIDGTVESISSGITDRNSTPDGQLLANVEPTFNWVRLAQRIPVRIRLDQVPADVHLSAGMTASVTVQGD

SEQ ID NO: 11914 - protein, 330 aa, Pseudomonas aeruginosa
MPRAAVVCGLGSYLPEAVLSNDMLAAELDTSDAWISSRTGVRQRHIAGDLGSGDLALRAASAALASAGLERVDAVVLATSTGDFCCPATAPRVAARLGLVGALAFDLSAACTGFVYGLASVGSLISAGLADSALLVGVDTFSHTLDPADRSTRALFGDGAGAVVLRAGDAEEEGALLAFDLGSDGHQFDLLMTPAVSRAERSSGQASNYFRMDGKAVFGQAVTQMSDSVRRVLDRVGWQASDLHHLVPHQANTRILAAVADQLDLPVERVVSNIAEVGNTVAASIPLALAHGLRQGILRDGGNMVLTGFGAGLTWGSVALRWPKIVPTMD

SEQ ID NO: 11915 - protein, 712 aa, Pseudomonas aeruginosa
MREQALRILKDVFGYDAFRGNQARIIERVAEGGDALVLMPTGGGKSLCFQVPALLREGLTVVVSPLIALMEDQVATLDELGVPAVALNSTLNPEQQRDIAERLQRGEIKLLYLAPERLVQPRMLAFLQRLPVGLFAIDEAHCVSQWGHDFRPEYLQLGQLAELFPQVPRIALTATADMRTREEMIQRLHLQNAEQFLSSFDRPNIFYRIVPKEQPRKQLLGFLSERRGDAGIVYCLSRKKVEEVAEFLGNQGFPALPYHAGLSNELRAHHQKRFLNEEGLIMVATIAFGMGIDKPNVRFVAHLDLPKSLEAYYQETGRAGRDGLPADAWMAYGLQDVLLLRQMMQSSEGDERHKRVERHKLEAMLALCEETRCRRQALLAYFDEEMPQPCGHCDNCVDGVETWDATESARQALSAIYRSGQRYGVGHLVDILLGRETEKIRSLGHQHLAVFGIGKGRGEDEWRTLFRQLVARGLADVDLDGFGGLRLTEACRPLLRGEVRLELRRDLKPQRAKGSSSGGASAASQLVRSEEREMWEALRALRRKLAEEHSVPPYVIFPDATLLEMLRSQPRSLSDMAQVSGVGARKLERYGQAFLDVLTDSPAAPAAPPQDLRHELASLACAGMTPAQIARQLNCSEKNVYAMLAEAIAGQQVSLEQALDLPEELLGEIQDAFLEEDGELPPVAALEERFGKRVPSGVLHCVRAALQVELES

SEQ ID NO: 11916 - protein, 333 aa, Pseudomonas aeruginosa
MNERNGEAKRLALLEAVNLALHRAMAEDETVVVLGEDVGVNGGVFRATLGLRERFGFKRVLDTPLAENMIAGLSIGMAAQGLKPVMEIQFMGFIYAAMEQLVSHASRLRNRTRGRLACPLVLRTPMGAGIRAPEHHSEATEAMFAHIPGVRVLVPSSPARAYGLLLAAIDDPDPVIFLEPTRLYRMNPQPLADDARRLPLDSCFTLREGGDLTLVSWGASVHETQQAAERLAQRGIEAEVIDVACLKPLDLDTLEASVRKTGRCVIVHEAPKSGGLGGEIAASLYERVLFDLRAPIQRVAAADIPPPLYRLEPLYMPAVEDILAACDTVLGYA

SEQ ID NO: 11917 - protein, 365 aa, Pseudomonas aeruginosa
MVHNRIDPPFTRYLDSDGRPLGELPAWAGDSDALVGLYRQMLLTRLFDQKAVALQRTGRIGTYAPTLGQEAIGVAIGSQMRAEDVLVPYYRDTAVQLMRGVRMEDILLYWGGDERGSDYAEPLAAQDFPICVPIATQALHACGVASAFRIRGEHRVAVTTCGDGATSKGDFLEALNVAGAWQLPVLFVVNNNQWAISVPRRIQCGAPTLAEKAVGAGFPGEQVDGNDVLAVAERVRAALERARQGKGPTLLECISYRLCDHTTADDASRYRSAEEVNQAWREEPIKRLRAFLAGRGQWDEEREQALVGECQARVQEAVERFETFAAQAPQALFEHVYARWPAVLEEQREQLLERAARRRGGAEHE

SEQ ID NO: 11918 - protein, 523 aa, Pseudomonas aeruginosa
MKKILLMLLCVSVLGCSKNSVESEKPVDVLLIGGGIMSATLGTYLNELEPGWTIEMVERLDKVAEESSNGWNNAGTGHSAFCELNYTSEAADGSMDISKAVAINENFEISKQFWAYQVDRKVLNDPKSFINNVPHMSFVWGDDNVAFLKKRHAALQHSSLFRGMEYSEDPEQIKQWVPLVMEGREPGQKIAATRMSIGTDVNFGEITRQLVGSLSAKDTFKLRLQHEVRDLKRNDDNTWTVTMADLANGDKETSVKARFVFIGAGGGALKLLQMSGIPEAEGYAGFPVGGSFLATTNPDVVKRHLAKVYGKASVGSPPMSVPHLDTRMIDGKPVLLFGPFATFSTKFLKNGSLWDLPGSVTSGNIGPMFNAGIDNFDLSQYLIGQLMLSQDDRMASLREYFPEARDEDWKLVQAGQRVQIIKKDAEKGGVLQFGTEVVTAADGSVAALLGASPGASTAAPIMLSVLEKAFKDKVATPEWQARLKEIVPSYGRKLNNDIELTNSTRAWSSERLQLIHVPVQPEA

SEQ ID NO: 11919 - protein, 157 aa, Pseudomonas aeruginosa
MVESNKTAADTYSLAIFRAIRRLQQAAEIHSKRLSRYGGLTPLQLLILHVLAVEGELTATQLAKLVSLSQASLSGVLDRLEGRGLLYRRRDEQDRRKSWLHLDPAGHEALAEAPPLLPEYVIERFAALPEWERHGLLAALLRAADLFGLPEEDVEEE

SEQ ID NO: 11920 - protein, 398 aa, Pseudomonas aeruginosa
MTPLPQPDLNYLQRVLLEMLAIPSPTGFTDTIVRYVAEQLDELGVPFEMTRRGTIRATLQGRLNTPDRAVSAHLDTIGALVREIKPNGRLGLAPVGCWSSRFAEGSRVTVFTEQGVFRGSVLPLLASGHAFNTEVDNLKISWDNIELRLDAYTASRADSESLGISVGDYVAFDPLPEFTESGHISARHLDDKAGVAALLAALKAVKESGQEPPIDCHPLFTITEEVGSGAAGALPWDVSEFVGIDIAPVAEGQNSNEHSVSVAMQDSGGPYDFHLSRHLLRLGERHDIALRRDLFRYYHSDAQSAIAAGHDTRAALLAFGCDATHGYERTHIDSLAALSRLLTAYILSPPVFASDAKPRETSLERFNKQLEHPVHMESCTHVPPVDEVLDSSNNSDKG

SEQ ID NO: 11921 - protein, 677 aa, Pseudomonas aeruginosa
MSEPRKILVTSALPYANGSIHLGHMLEYIQTDMWVRFQKMRGNQAVYVCADDAHGSAIMLRAEREGITSEQLIDAVRAEHMGDFADFLVDFDNYHSTHSEENRELSSAIYLKLRDAGHIDTRPVTQYFDPEKQMFLADRFIKGTCPKCGTADQYGDNCEACGATYAPTELKDPKSAISGATPVLKESLHYFFKLPDFEAMLKQWTRSGALQESVANKLAEWLDSGLQQWDISRDAPYFGFEIPDAPGKYFYVWLDAPIGYMASFKNLCARRPELDFDAFWGKDSGAELYHFIGKDIVNFHALFWPAMLEGAGYRKPTALNVHGYLTVNGQKMSKSRGTFVKARTYLDHLDPEYLRYYYASKLGRGVEDLDLNLEDFVQKVNSDLVGKVVNIASRCAGFIHKGNAGVLVGADPAPELLAAFREAAPGIAEAYEARDFNRAMREIMALADRANAWIAEQAPWALAKQEGQQDKVQAVCGLGINLFRQLVIFLKPVLPKLAAAAEAFLNVAPLTWADHQTLLANHQLNPFQPLMTRIEPAKVEAMIEASKEDLAAASQPAGNGELVKEPIAAEIDFDAFAAVDLRIALIEKCEFVEGADKLLRLSLDIGDAKRNVFSGIKSAYPDPSALEGRLTLYVANLAPRKMKFGVSEGMVLAAGPGGEEIYLLSPDSGAKPGQRVK

SEQ ID NO: 11922 - protein, 477 aa, Pseudomonas aeruginosa
MPSHITESRIHGGAYSSPAFAAIFSDTNQVRRWLDVERALAATQAEMGIIPHEAAREIDRAAQVERFDLTQLGRESLETGHLLVPTIRALARSCEGSWGEYVHYGVTTQDILDTGLMLQVKEAWGHALGLLHSIRGHLLALALRHQHTPMVARTHGQQALPTTFGYKVAVWVDEIDRHLARFDEARERVLVGNLTGAVGTLASFGAQGFELQRRTLARLGLGAPSTSWHSARDRVLEVAGLLVQVSVTLGRVANEIYHLQRSEIDEVREGSRPGQVGSSTMPHKRNPSSVDLVSALSRLVRAQMVALTDAAFQLHERDGTAWRIEWAALPELFVYAGALLTRMEAVLAEGLEVREERMRANLDLLGGLILSERVMLALAGQFGKQTAHELLHEITQASQRQGVPFREALLGQPRLRGCFSAEALEELLDPVGYVGLAAEMVDLVADKPRTGASGDRPEGAASSQGNPGQSQYVMEDR

SEQ ID NO: 11923 - protein, 585 aa, Pseudomonas aeruginosa
MKLAIVTACPGGQVTSVLAARLLRGAAERLGWETCVEANAGSRPEGELSAEQIAEADWVLLVGVEPLAAARFVGKPVYRARPAEALADPRAFLQRAAALASVEVAGDEAGLVAPEAGAAPRIVAVTACPTGVAHTFMAAEALQLAAGQLGFALQVETQGSVGARNPLDPADIAAADVVLLAADIDVDTARFAGKKIYRCGTGVALKQARATLERALAEGQVESAGAASAVVARDEKRGVYKHLLTGVSFMLPMVVAGGLLIALSLAFGIDAYKQPGSLAAVLRTVGDTAFVLMVPMLAGYIAYSIADRPGLAPGMLGGLLAGTLGAGFIGGIVAGFIAGYAARAISHGLRLPASLEALKPILVIPLLASLVTGLLMLYVVGKPVAGMLAALTGFLDGMGTSNAILLGLLLGGMMCVDLGGPVNKAAYAFSVGLLSSHSYAPMAAVMAAGMVPPIGMGLATLLARRKFAESERQAGKAASVLGLCFISEGAIPFAAKDPLRVIPASIAGGALTGALSMYFGCKLQAPHGGLFVMLVPNAINHALAYLLAIVAGSLLTGLLYAVLKRGAEPGLALGTSSSREPAAGG

SEQ ID NO: 11924 - protein, 314 aa, Pseudomonas aeruginosa
MARILTITLNPALDLTVRLRQLELGAVNRSEAVLTQAAGKGLNVAQVLADLGHRLTVSGFLGEDNQPPFTAMFQRRGFADAFVRVPGETRSNIKLAERGGRVSDLNGPGPEADERAQAALLERLDRLAGEHELAVVAGSLPRGVEPEWLGELLRRLRRLGLKVAFDSSGAALREGVKAAPWMIKPNVEELADLCSAPMDDLVAQRQAAERLRHDGVGQVVISQGAAGVNWFAAEGAWQARPPAVEVASTVGAGDSLLAGMLHGLASGWPAERVLRQATAIASLAVTQFEFGIGDPQRLARIEAGVVVQPLVEEA

SEQ ID NO: 11925 - protein, 956 aa, Pseudomonas aeruginosa
MLELDTRQIRMGQRAADKAEALRLLGAALVADGLAAPGYAEGLKAREAQGSTYLGQGIAIPHGTPDTRELVFSTGVRLLQFPEGVDWGDGQQVYLAIGIAAKSDEHLQLLQLLTRALGEADLGPALSAAASAEEVLGLLQGAPQELALDAQLVGLGQNAEDLDELAWLGARLLKKAGCVENGFAAVLQQTEPLPLGDGLCWLHSEQLVKRPGLAFVTPAQPLQHQGQLVTGLFCLASLGEAHQALLERLCDLLLEGRGAELVRATSSRSVLAALGGELPPDWPSARAVLANPHGLHARPAQALAQLAKGFAGEIRVRLADSEAAPVSAKSLSKLLALGARRGQTLEFSAEPAIAEDALPALLAAVREGLGEEVEALAEEALPDAVGEAEEDARPAPLRAGERLQAIAASPGIASGPAHVQVAQRFEFQPRGESPAHERERLLRAKRAVDEEIVGLVERSTVKAIREIFVTHREMLDDPELAEQVQLRLNRGESAEAAWSRVVEDSAAQQEALHDALLAERAADLRDLGRRVLARLCGVEAPREPEQPYILVMDEVGPSDVARLDAQRVAGILTARGGATSHSAIIARALGIPALVGAGAAVLGLEPGTALLLDGEHGWLQVAPSTEQLQQAAAERDARQQRQARADAQRLEPARTRDGHAVEVCANLGDTAGAARAVELGAEGVGLLRTEFVFMNNARAPDLATQEAEYRRVLDALDGRPLVARTLDVGGDKPLPYWPIPHEENPYLGLRGIRLTLQRPQILETQLRALFRAAGERPLRVMFPMVGSLDEWRQARDLALRLREEIPLADLQLGIMVEVPSAALLAPVLAREVDFFSVGTNDLTQYTLAIDRGHPSLSAQADGLHPAVLQLIDMTVRAAHAEGKWVGVCGELAADPLALPLLVGLGVDELSVSARSIALVKAGVRELQLVAARGLARKALGLASAAEVRALVEAEVQ

SEQ ID NO: 11926 - protein, 337 aa, Pseudomonas aeruginosa
MKAVGYYQSLPIDHPDALLDLELPEPTPGPRDLLVEVRAISVNPVDTKVRQRAQPEAGQAKVLGWDAAGVVRAVGSEVSLFRPGDRVWYAGDITRPGSNSELHRVDERIAGHLPKSLDFAQAAALPLTTITAWELLFERLQIAEGKADQGQSLLVVGAAGGVGSILVQLARQLTGLNVIGTASRAETQAWVRDLGAHHVIDHGKPLAEELKRIGVAEVSHVASLTHTDQHLEQIVAALRPQGRLALIDDPASLDIGKLKQKSLSLHWEFMYTRSMFQTDDMIEQHRLLERVAGLIDEGVLKTTVGEHFGRIDAANLRRAHALLESGRAKGKIVLEGF

SEQ ID NO: 11927 - protein, 505 aa, Pseudomonas aeruginosa
MTDKHNKKYVVALDQGTTSSRAIVFDRDANVVSQAQREFAQFYPQAGWVEHDPMEIWATQSSTLVEALAQASIEHDQVAAIGITNQRETTVVWDRHSGRPIHNAIVWQCRRSAAICAQLKRDGLEDYIRETTGLVTDPYFSGTKLKWILDNVEGARERARNGDLLFGTIDTWLIWKLTEGKVHVTDYTNASRTMLFNIHSRDWDARMLEVLDIPRSMLPEVRNSSEVYGNARIGGVGGGELPIAGIAGDQQAALFGQMCVEPGQAKNTYGTGCFLLMHTGDKAVKSTHGLLTTIACGPRGEVGYALEGAVFNGGSTVQWLRDELKVINDSFDSEYFATKVKDSNGVYLVPAFTGLGAPYWDPYARGAVFGLTRGVKADHLIRATLESIAYQTRDVLDAMQRDAGERLRALRVDGGAVANNFLMQFQADILGTRVERPVMRETTALGAAYLAGLACGFWSSLDELKSKAVIERVFEPECDEPRREKLYAGWKKAVERTRGWDDGEL

SEQ ID NO: 11928 - protein, 87 aa, Pseudomonas aeruginosa
MKPGIHPEYRPVLFHDTSADVYFLIGSTAETDKTHTHTDGKTYPYVTLDVSSASHPVYTGEQRKTKSEGRVAGFNKRFAGFVGGKGA

SEQ ID NO: 11929 - protein, 536 aa, Pseudomonas aeruginosa
MNLSLLSRYAFFACIALFTLLSLPFLGSTEWLWPFTLLGVALSLLGLFDLIQTPHAVRRNYPILGNIRYLVEGIRPEIRQYLLEADGDALPFSRAQRSLVYSRAKNESSEKPFGTLIDVYTAGYEFISHSMRPAPLSDPCEFRVDIGGPQCSKPYSASLFNVSAMSFGALSANAIRSLNRGAQMGNFYHDTGEGSISPYHRENGGDLVWELGSGYFGCRTRDGKFDPERFAAQALDPQVKMIEIKLSQGAKPGHGGILPKHKVTPEIAATRGVPMGEDCVSPSRHSAFSTPIELMQFIAQLRELSGGKPVGFKFCLGHPWEFMGIAKAMLETGILPDFIVVDGKEGGTGAAPLEFTDHIGVPLREGLLFVHNTLVGLNLRDKIKVGASGKIVSAFDIASVLATGADWANSARGFMFAIGCIQSQSCHTNKCPTGVATQDPLRQRALVVPDKAERVRNFHRNTLKGLAEMLAAAGLEHPSQLEAKHLVRRITDTEIRLFSQLHYFLKPGELLSGKIEGEFYERMWNMARADSFDAAA

SEQ ID NO: 11930 - protein, 855 aa, Pseudomonas aeruginosa
MTDLSQHTPMMQQYFKLKHQHPDQLMFYRMGDFYELFYEDAKKAAKLLDITLTARGQSGGKAIPMAGIPFHSAEGYLAKLVKLGESVAICEQIGDPATSKGPVERQVVRIITPGTVSDEALLDERRDNLLAAILGDERLFGLAVLDITSGRFSVQEIKGWETLLAELERLNPAELLIPDDWPQGLPAEKRRGVRRRAPWDFDRDSAHKSLCQQFGTQDLKGFGCQNLTLAIGAAGCLLAYAKETQRTALPHLRSLRHDRLDDTVILDGASRRNLELDINLSGGRENTLQSVVDRCQTAMASRLMSRWLNRPLRDRAVLEARQESIACLLERYRFENLQPQLKEIGDLERILARIGLRNARPRDLARLRDALAALPDLQNAMTELEAPHLQALATTIGTYPELAELLAKAIIDNPPAVIRDGGVIKTGYDAELDELQALSENAGQFLMDLEAREKARTGLPNLKVGYNRIHGYFIELPRVQAEQAPADYIRRQTLKGAERFITPELKAFEDKALSAQSRALAREKALYEELLERLIGHLAPLQDSASALAELDVLANLAERALNLDLNRPRFVEHTCLHIEQGRHPVVEQVLETPFVANDLALDADTRMLVITGPNMGGKSTYMRQTALIVLLAHIGSFVPAARCELSLVDRIFTRIGSSDDLAGGRSTFMVEMSETANILHNATDKSLVLMDEVGRGTSTFDGLSLAWAAAEDLARTRAFTLFATHYFELTVLPESQPAVANVHLNATEHNERIVFLHHVLPGPASQSYGLAVAQLAGVPAPVIQRAREHLKRLETTSLPHEMPSQQSGKPASPMQSDLFASLPHPVIDELSRINPDDISPRQALDLLYAWKMRV

SEQ ID NO: 11931 - protein, 234 aa, Pseudomonas aeruginosa
MTTSDLPAFWTVIPAAGVGSRMRADRPKQYLDLAGRTVIERTLDCFLEHPMLRGLVVCLAEDDPYWPGLDCAASRHVQRAAGGAERAGSVLNGLLRLLELGAQADDWVLVHDAARPNLTRGDLDRLLEELAEDPVGGLLAVPARDTLKRSDRDGRVSETIDRSVVWLAYTPQMFRLGALHRALADALVAGVAITDEASAMEWAGYAPKLVEGRADNLKITTPEDLLRLQRSFPH

SEQ ID NO: 11932 - protein, 429 aa, Pseudomonas aeruginosa
MAKIVDIKGREVLDSRGNPTVEADVILDNGIVGSACAPSGASTGSREALELRDGDKSRYLGKGVLKAVANINGPIRDLLLGKDAADQKALDHAMIELDGTENKAKLGANAILAVSLAAAKAAAQAKGVPLYAHIADLNGTPGQYSMPVPMMNIINGGEHADNNVDIQEFMVQPVGAKNFAEALRMGAEIFHHLKAVLKARGLNTAVGDEGGFAPNLSSNEDALAAIAEAVEKAGYKLGDDVTLALDCASSEFFKDGKYDLEGEGKVFDAAGFADYLAGLTQRYPIISIEDGMDESDWAGWKGLTDKIGAKVQLVGDDLFVTNTKILKEGIEKGIGNSILIKFNQIGSLTETLEAIQMAKAAGYTAVISHRSGETEDSTIADLAVGTAAGQIKTGSLCRSDRVSKYNQLLRIEEQLGAKAPYRGRAEFRG

SEQ ID NO: 11933 - protein, 542 aa, Pseudomonas aeruginosa
MTRYIFVTGGVVSSLGKGIASASLAAILEARGLKITMLKLDPYINVDPGTMSPFQHGEVFVTQDGAETDLDLGHYERFVRTTMTQNNNFTTGRVYMDVLRKERRGDYLGATVQVIPHITDEIKRRIIKGAGDADVALVEIGGTVGDIESQPFLEAIRQLRVEIGAKRAMLMHLTLVPYIATAGETKTKPTQHSVKELRSIGLQPDVLVCRSDHPIDVSSRRKIALFTNVEERAVIALEDVDTIYRIPSVLHAQGLDDIVVERFGLECGQADLSEWDRVVDAKLNPEREVTIAMVGKYMELLDAYKSLIEAMTHAGIQSRTKVNLRYIDSEDIEQQGTSLLEGVDAILVPGGFGLRGVEGKISTVQYARENKIPYLGICLGMQVAVIEYARNVLGWSDANSTEFDKSSGHPVVGLITEWQDATGATEIRTEASDLGGTMRLGAQECQLQTGTLVHDCYAKDVIVERHRHRYEVNNNLLPQLEQAGLKISGRSGDGALVEVVEAPEHPWFVACQFHPEFTSTPRDGHPLFSGFVNAALKYSGKA

SEQ ID NO: 11934 - protein, 316 aa, Pseudomonas aeruginosa
MNPNFLDFEQPIADLQAKIEELRLVGNDNALNISDEISRLQDKSKALTENIFGNLSSWQIAQLARHPKRPYTLDYIGYLFSDFEELHGDRHFADDPAIVGGVARLDGSPVMVIGHQKGREVREKVRRNFGMPRPEGYRKACRLMEMAERFKMPILTFIDTPGAYPGIDAEERGQSEAIAWNLRVMARLKTPIIATVIGEGGSGGALAIGVCDQLNMLQYSTYSVISPEGCASILWKTAEKAPEAAEAMGITAERLKGLGIVDKVIDEPLGGAHRDPASMAESIRGELLAQLKMLQGLEMGELLERRYDRLMSYGAP

SEQ ID NO: 11935 - protein, 1173 aa, Pseudomonas aeruginosa
MTVSFVHLRLHTEFSLVDGLVRVKPLAKAVAGLGMPAVAVTDQSNMCSLVKFYKTAMGAGIKPICGADIWLASREEDGPLSRLSLLAMNAKGYRNLTELISRGWSEGQRNGEIIIERDWVKEAAEGLIALSAAKEGEIGHALLDGEEAKAEALLREWMEVFPERFYVEVQRTSRVNDEEHLHAAVALASRCNAPLVATNDVRFIKQEDFEAHETRVCIGEGRTLDDPRRPRTYSDQQYLKSPAEMAELFSDLPEALENTVEIAKRCNIEVQLGKYFLPDFPTPNGMGIDDYLRHASFEGLEERLEVLLPKDTPDYEAKRQVYVDRLNFELDIIIQMGFPGYFLIVMDFIKWAKNNGVPVGPGRGSGAGSLVAYVLKITDLDPLAYDLLFERFLNPERISMPDFDVDFCMEGRDRVIDYVADAYGRNAVSQIITFGTMAAKAVVRDVARVQGKSYGLADRLSKMIPFEVGMTLDKAYEQEEMLRDFLKSDEEAAEIWEMALKLEGITRGTGKHAGGVVIAPTKLTDFSPIACDEEGGGLVTQFDKDDVEAAGLVKFDFLGLRTLTIIKWAMEIINREQAKKGLEPVNIDFIPLDDKPTYSLLQKAETTAVFQLESRGMKELIKKLKPDCLEDLIALVALFRPGPLQSGMVDDFINRKHGRAELSYPHPDYQYAGLEPVLKPTYGIILYQEQVMQIAQVMAGYTLGGADMLRRAMGKKKPEEMAKQRGGFIEGCKNNGIDADLAGNIFDLVEKFAGYGFNKSHSAAYGLVSYQTAWLKTHFPAPFMAAVLTADMQNTDKVVTLIEECRHMKLRIVAPDVNNSEFRFTVDDDGRIVYGLGAIKGVGEGPVEAITECRAEGGPFNTLFDFCDRVDLKRINKRTLEALIRAGALDRLGPHYHDELKAYQATVDLNRAVLLAAMEEAIQAAEQTARSHDSGHMDLFGGVFAEPEADVYANHRKVKELTLKERLKGEKDTLGLYLTGHPIDEYEGEVRRFARQRIVELKPARDTQTVAGLIVNLRVMKNKKGDKMGFVTLDDRSGRIEASLFSEAFAAAQSLLQTDALVVVEGEVSQDDFSGGLRLRAKRVMSLEEARTGLAESLRMKLHADLLKGDRLRWLGELFNRHRGSCPITLDYTSADAKALLQFGESWRVDPADDLIQALRDQFGRDNVFLNYR

SEQ ID NO: 11936 - protein, 471 aa, Pseudomonas aeruginosa
MQEFATQVVDLLNGLIWGKILIWLLVGCGLYFTVRLGLIQFRHFGHTFSVLKGSRQSDDSGISSFQALCTSLAARVGTGNVAGVAVAITLGGPGAVFWMWAIALVGMATGFVEATLAQLFKIRDDKGQFRGGPAYYMEKGLGARWMGILFSIFLIIAFGFVFNSVQANTITGAMQGAFGVPTWISGIAVVILTALIIFGGLRSIARFSELAVPFMAVAYLLLAVGIILFNLSELPGVLAMVVKSAFGWHEAAAGGIGAAILNGFKRGLFSNEAGMGSAPNAAASATPYPPHPASQGYVQMAGVFIDTLLICTASAAIILLAGPQEGEGIMLVQNALTSQVGDWGRYFLAVIILFFAFTSIVANYFYAENCLVFLEHNHLAGLLIFRLIVLAMVMFGALASLPFVWNLADVSMGLMAITNLIAILLLSNLAIKLAKDYNAQRKAGKLPTFDASQFPEVQQKLEPGIWDDRRA

SEQ ID NO: 11937 - protein, 146 aa, Pseudomonas aeruginosa
MMDINEIREYLPHRYPFLLVDRVVELDIEGKRIRAYKNVSINEPFFNGHFPEHPIMPGVLIIEAMAQAAGILGFKMLDVKPADGTLYYFVGSDKLRFRQPVLPGDQLQLHAKFISVKRSIWKFDCHATVDDKPVCSAEIICAERKL

SEQ ID NO: 11938 - protein, 251 aa, Pseudomonas aeruginosa
MEKTRKDVCVPRHVAIIMDGNNRWAKKRLLPGVAGHKAGVDAVRAVIEVCAEAGVEVLTLFAFSSENWQRPADEVSALMELFLVALRREVRKLDENGIRLRIIGDRTRFHPELQAAMREAEAATAGNTRFLLQVAANYGGQWDIVQAAQRLAREVQGGHLAADDISAELLQGCLVTGDQPLPDLCIRTGGEHRISNFLLWQLAYAELYFSDLFWPDFKHAAMRAALADFSKRQRRFGKTSEQVEAEARPSC

SEQ ID NO: 11939 - protein, 185 aa, Pseudomonas aeruginosa
MINEIKKEAQERMGKTLEALGHAFAKIRTGRAHPSILDSVMVSYYGADTPLRQVANVTVEDSRTLALAVFDKSMIQAVEKAIMTSDLGLNPATAGTTIRVPMPALTEETRKGYTKQARAEAEQARVSVRNIRRDALAQLKDLQKEKEISEDEERRAGDDVQKLTDKFIGEIEKALEAKEADLMAV

SEQ ID NO: 11940 - protein, 289 aa, Pseudomonas aeruginosa
MAEITAAMVKELRERTGLGMMECKKALTAAGGDIEKAIDDMRAAGAIKAAKKAGNIAAEGSIAVKIAADNKAAVIIEVNSQTDFLALQDDFKGFVAESLEKAFNEKLTDAAPLVEAREEARLALVAKTGENVNIRRLTRVEGDVVGAYLHGHRIGVVVNLKGGNPELAKDIAMHVAASNPQFLSASEVSEEAIAKEKEIFLALNADKIAGKPENIVENMVKGRISKFLAEASLVEQPFVKNPEVKVGDLAKQAGAEIVSFVRYEVGEGIEKAEVDFAAEVAAQVAATKQ

SEQ ID NO: 11941 - protein, 246 aa, Pseudomonas aeruginosa
MSQVNMRDMLKAGVHFGHQTRYWNPKMGKFIFGARNKIHIINLEKTLPMFNEALTFVERLAAGKNKILFVGTKRSAGKIVREEAARCGMPYVDHRWLGGMLTNYKTIRQSIKRLRDLETQSQDGTFDKLTKKEALMRSRDLEKLERSLGGIKDMGGLPDALFVIDVDHERIAITEANKLGIPVIGVVDTNSSPEGVDYVIPGNDDAIRAVQLYLNSMAEAVIRGKQGAATSADEFVEEAPAESAEG

SEQ ID NO: 11942 - protein, 215 aa, Pseudomonas aeruginosa
MRVILLGAPGAGKGTQARFITEKFGIPQISTGDMLRAAVKAGSPLGQQVKGVMDSGGLVSDDIIIALIKERITEADCAKGFLFDGFPRTIPQAEALKDAGVTIDHVVEIAVDDEEIVSRIAGRRVHPASGRVYHTEHNPPKVAGKDDVTGEELIQREDDKEETVRHRLSVYHSQTKPLVDFYQKLSAAEGTPKYHSIAGVGSVEQITAKVLSALS

SEQ ID NO: 11943 - protein, 501 aa, Pseudomonas aeruginosa
MSDQQLDQHELQQEENKLIAQRKEKLAAVREARAIAFPNDFRRDAYFADLQKQYADKTKEELEAAAIPVKVAGRIMLNRGSFIVLQDSSERLQVYVNRKTLPEETLAEIKTWDLGDIIGAEGVLARSGKGDLYVDMTSVRLLTKSLRPLPDKHHGLTDTEQRYRQRYVDLMVNEETRHTFRVRSQVIAHIRRFLSERGFLEVETPMLQTIPGGAAAKPFETHHNALDMAMFLRIAPELYLKRLVVGGFEKVFEINRNFRNEGVSTRHNPEFTMLEFYQAYADYEDNMDLTEELFRELAQSVLGTTDVPYGDKVFHFGEPFVRLSVFDSILKYNPEITAADLNDVEKARAIAKKAGAKVLGHEGLGKLQVMIFEELVEHKLEQPHFITRYPFEVSPLARRNDEDPSVTDRFELFIGGREIANAYSELNDAEDQAERFMLQVKEKDAGDDEAMHYDADFINALEYGMPPTAGEGIGIDRLVMLLTNSPSIRDVILFPHMRPQA

SEQ ID NO: 11944 - protein, 298 aa, Pseudomonas aeruginosa
MSTLEHPLIDRFLDALWLEKGLADNTREAYRNDLQQFNAWLDGRGLRLEGIGRDAILDHLAWRLEQGYKARSTARFLSGLRGFYRYCLRDGLIAEDPTLQVDLPQLGKPLPKSLSEADVEALLAAPEVDDPLGLRDRTMLEVLYACGLRVSELVGLTLEQVNLRQGVVKVFGKGSKERLVPLGEEAIGWLERYLREARGDLLGGRPSDVLFPSLRGEQMTRQTFWHRIKHHAQVAAIGTSISPHTLRHAFATHLLNHGADLRVVQMLLGHSDLSTTQIYTHIARARLQDLHARHHPRG

SEQ ID NO: 11945 - protein, 116 aa, Pseudomonas aeruginosa
MTNKIIQQIEAEQMNKEIPAFAPGDTVIVQVKVKEGDRQRLQAFEGVVIAKRNRGLNSAFTVRKISNGVGVERTFQTYSPIVDSLSVKRRGDVRKAKLYYLRALSGKAARIKEKLV

SEQ ID NO: 11946 - protein, 252 aa, Pseudomonas aeruginosa
MDKRLWVGVVSIFPEMFRAISDYGITSRAVKQGLLTLTCWNPRDYTEDRHQTVDDRPFGGGPGMVMKIKPLEGALADARQAAGGRKAKVIYLSPQGRQLTQAGVRELAEEEALILIAGRYEGIDERFIEEHVDEEWSIGDYVLSGGELPAMVLVDAVTRLLPGALGHADSAEEDSFTDGLLDCPHYTRPEVYADKRVPEVLLSGNHEHIRRWRLQQALGRTWERRADLLDSRSLSGEEQKLLAEYIRQRDDS

SEQ ID NO: 11947 - protein, 83 aa, Pseudomonas aeruginosa
MVTIRLARGGSKKRPFYHLTVTNSRNARDGRFVERIGFFNPVATGGEVRLSVDQERATYWLGQGAQPSERVAQLLKDAAKANA

SEQ ID NO: 11948 - protein, 457 aa, Pseudomonas aeruginosa
MFENLTDRLSQTLRHVTGKAKLTEDNIKDTLREVRMALLEADVALPVVKDFVNKVKERAVGTEVSKSLTPGQAFVKIVRAELEELMGAANEDLALSVAPPAVILMAGLQGAGKTTTAGKLARFLKERKKKSVMVVSADVYRPAAIKQLETLAGEVGVTFFPSDVSQKPVAIAEAAIREARLKFIDVVIVDTAGRLHIDADMMDEIKQVHAAIKPAETLFVVDAMTGQDAANTAKAFNDALPLTGVVLTKVDGDARGGAALSVRAITGKPIKFLGMGEKSEALDPFHPDRVASRILGMGDVLSLIEQAEQNLDRDKAEKLAKKIKKGKGFDLEDFRDQLQQMKNMGGLGGLMDKLPMLGGVNLAQMGNAQGAAEKQFKQMEAIINSMTPGERRDPEMISGSRKRRIALGSGTQVQDVGRLIKQHKQMQKMMKKVTAKGGMAKMMRGMGSMFPGGMPKL

SEQ ID NO: 11949 - protein, 363 aa, Pseudomonas aeruginosa
MLEGNILTPQGWVLGRLHIQDGRIQRIEGEPCDPAGNADPYLLPGFIDLHVHGGGGRDIMEGGDAFATIARTHRRFGTTSLLATTMTAPREEIADILSQLGAYCRRSLEGGSRILGVHLEGPYINSGKLGAQPNFAHAAVLEEVEDYLRRAPIRVITIAPEIAGHRPLIRALAERGVRLQIGHTLGSYEDGVAALEAGASSFTHLYNAMTGLHHREPGIVGAALAHARYAELIPDLLHVHPGAIRVALRSIPCLYCVTDSTAAAGMPDGQYKLGSHTVTKCLGGVRLPDGTLAGSTLTMDQALRNLVKIGLPLAEASQRLSQFPADYLGLAERGRLAPAAWADVVRLDRSLELDAVMVEGELE

SEQ ID NO: 11950 - protein, 842 aa, Pseudomonas aeruginosa
MNNKNLALKAPLSGPVMPLNRVPDPVFSSGTLGEGIAIDPLNDCLHAPCAGLVSHLARTRHALSLRADNGAELLLHVGLDTVQLQGEGFEALVEEGARVIEGQPLLRFDLDRVARGSRSLITVMILTNGDGFQVRPLTTNPVEVGAPLLQLSPEKAEQRPANPAPGEGSAQRQVRGRARVAHHGGLHARPAALLRKTAQGFSSQAELHFAGQVASVDSLVGIMGLGVAEQDEVEVICRGEDSEAALGALLAALASATAGAPKDAPRAIAPGEPARPAAVAGTLAGVCASPGLASGPLARLGAISLPADDGRHRPEEQHLALDQALQRVRDDVQGSLQQARLGGDENEAAIFSAHLALLEDPGLLDAADMLIDQGVGAAHAWHRAIQAQCEILQALGNLLLAERANDLRDLEKRVLRVLLGDTAPLRVPAGAIVAAREITPSDLAPLVDAGAAGLCMAEGGATSHVAILARSKGLPCLVALGAGLLELEEGRQVVLDAGQGRLELSPDARRLEQVALQVAQREEQRRRQQADAQREALTRDGRRIEIGANVASPREAAEAFANGADGVGLLRTEFLFLERRAAPDEEEQRNAYQEVLDAMGQRKVIIRTIDVGGDKHLDYLPLPVEENPALGLRGIHLGQARPELLDQQLRALLRVEPLERCRILLPMVSEVDELRAIRRRLGELATQLGIERLPELGVMIEVPSAALLADQLAEHADFLSIGTNDLSQYALAMDRCHAGLADRIDALHPALLRLIAQTCAGAARHGRWVGVCGALASDPLATPVLVGLGVEELSVGPNLVGEIKTRVRQLDAAECRRHAQALLDLGSARAVRDACLQHWPLA

SEQ ID NO: 11951 - protein, 570 aa, Pseudomonas aeruginosa
MPPFLIESLQRLGRALMLPIAILPIAGLLLRLGDVDLLDIPLVHDAGKAIFANLALIFAIGIAVGFARDNNGTAGLAGAIGYLVMISVLKVIDPGIDMGVLSGIISGLVAGALYNRFKDVKLPEYLAFFGGRRFVPIATGISAVCLGLLFGVIWPPLQQGINGLGQLMLESGSFGAFAFGVLNRLLIVTGLHHILNNLVWFVFGSFTDPETGRVVTGDLARYFAGDPKGGQFMAGMFPVMMFGLPAACLAMYRNARPERRKLIGGLLLSMALTAFLTGVTEPVEFAFMFLAPLLYLLHALLTGLSMALTDLLDIRLGFTFSGGAIDLALGWGRSTHGWMLWPLGLLYAGIYYLVFDFCIRRFNLKTPGREDDASSESGDNAEAERAPAFIRALGGAANLEVVDACTTRLRLRLVDRNKASDAQLKALGAMAVVRPGKAGSLQVVVGPQADSIADEIRRALPFDTQPGEAVPPLGSPHTAEEVVAMQATVDAAEAQAWLGALGGAGNLREVRDVALTRLRVSVADERKLATEQLRRLGGQGVSSLAGGICHILVGPRAAALSQALQPLLRR

SEQ ID NO: 11952 - protein, 525 aa, Pseudomonas aeruginosa
MSQDIHAHRILILDFGSQYTQLIARRVREIGVYCEIHPFDMSNEAIIAFAPRGIILAGGPESVHEADSPRAPQAVFDLKVPLFGICYGMQTMAEQMGGKVQGSDLREFGYARVDVVGKARLLDGIEDHVDDDGVLGLDVWMSHGDKVTEMPAGFHILASTPSCPIAAMADDARAYYGVQFHPEVTHTKQGLRILSRFVLDICGCAALWTPSNIVDDAIATVRAQVGSSKVLLGLSGGVDSSVVAALLHKAIGDQLTCVFVDNGLLRLHEGDQVMAMFAENMGVKVIRANAEDKFLGRLAGVADPEEKRKIIGRTFIEVFDEEATKLQDVKFLAQGTIYPDVIESAGAKTGKAHVIKSHHNVGGLPEDMQFELVEPLRELFKDEVRKIGLELGLPYDMVYRHPFPGPGLGVRILGEVKKEYADLLRQADHIFIEELRAFDWYHKTSQAFVVFQPVKSVGVVGDGRRYAWVVALRAVETIDFMTARWAHLPYELLEKVSNRIINEIAGISRVTYDVSSKPPATIEWE

SEQ ID NO: 11953 - protein, 489 aa, Pseudomonas aeruginosa
MLRISQEALTFDDVLLIPGYSEVLPKDVSLKTRLTRGIELNIPLVSAAMDTVTEARLAIAMAQEGGIGIIHKNMGIEQQAAEVRKVKKHETAIVRDPVTVTPSTKIIELLQMAREYGFSGFPVVEQGELVGIVTGRDLRVKPNAGDTVAAIMTPKDKLVTAREGTPLEEMKAKLYENRIEKMLVVDENFYLRGLVTFRDIEKAKTYPLASKDEQGRLRVGAAVGTGADTGERVAALVAAGVDVVVVDTAHGHSKGVIERVRWVKQTFPDVQVIGGNIATAEAAKALAEAGADAVKVGIGPGSICTTRIVAGVGVPQISAIANVAAALEGTGVPLIADGGIRFSGDLAKAMVAGAYCVMMGSMFAGTEEAPGEIELFQGRSYKSYRGMGSLGAMSGSQGSSDRYFQDASAGAEKLVPEGIEGRVPYKGALSAIVHQLMGGLRAAMGYTGSADIQQMRTQPQFVRITGAGMAESHVHDVQITKEAPNYRVG

SEQ ID NO: 11954 - protein, 459 aa, Pseudomonas aeruginosa
MRNDPFQRLGLDREVLTVSQLNQRARLLLEDVFPQVWVEGELSNLARPASGHVYFTLKDSNAQIRCALFRQNALRVRQALRDGLAVKVRGKISLFEGRGDYQLIADTVEPAGDGALRLAFEALKEKLAGEGLFASERKRPLPAHPRRIGIVSSPSGAVIRDIISVFRRRAPQVELTLVPTAVQGREAVAQIVRALQLADRQGFDALILARGGGSLEDLWCFNEEAVARAVAACATPIVSAVGHETDVSISDFVADVRAPTPSAAAELLAPNAGDLQQRLDGLRRRLVLRMRDQLLRERLRLEGVARRLRHPGERLRQQAQRLDDLDMRLRRAFERQLAVRHERLVRLETRLAAQHPGRTLALLRQKLDSLAARLPRAAREVLKDRRQRLEGLAQTLNVVSPLATLGRGYSILLDERGRAIRDAGQTQPGQRLKARLAEGELEVRVEDNHRTPVTLSLLD

SEQ ID NO: 11955 - protein, 493 aa, Pseudomonas aeruginosa
MVPVIALVGRPNVGKSTLFNRLTKSRDAIVAEYAGLTRDRQYGEARWQGRTYIVIDTGGISGDEEGIDAKMAEQSLQAIEEADAVLFLVDSRAGMTAADQMIAEHLRKRNKRSFLIANKVDTIDPDLARAEFSPLGLGDALPIAAAHGRGINHMLQEALGIFPKDNAEEEGEGEPASEEVAEGEEPTRIPGPSEKDGIKIAIIGRPNVGKSTLVNRMLGEERVIVYDQAGTTRDSIYIPFERNEEKYTLIDTAGVRRRGKIFEAVEKFSVVKTLQAIQDANVVIFVMDAREGVVEHDLNLLGFVLETGRALVIALNKWDGMEAAERDYVKTELERRLLFVDFADIHFISALHGTGVGHLYKSVQESFRSAVTRWPTSRLTSILEDAVQVHQPPMVNGRRIKLRYAHLGGANPPLIVIHGNQVDAVPKAYTRYLEKTYRRVLKLVGTPIRIEYKGGENPYEGKKNSLTARQVNKKRRLMSHHKKAEKKKKDKRR

SEQ ID NO: 11956 - protein, 429 aa, Pseudomonas aeruginosa
MSKSLQAIRGMNDILPEQTPAWRYLERTFAGLLDGYGYSEIRLPILEFTELFARGIGEGTDVVDKEMYTFLDRNGESLTMRPEGTAGCVRAVLEHGLSGGGQVQKLWYTGPMFRYEKPQKGRYRQFHQIGVEVFNLPGPDIDAELIILTWRLWQKLGMADAVTLQLNTLGSSEARARYREALVAYLQERFEQLDEDSQRRMTTNPLRILDSKVESTQALLVGAPTLHDYLDEESIAHFEGLKARLDAVGLRYEINQKLVRGLDYYCRTAFEWVTDKLGAQGTVCGGGRYDGLVSQFGGKPTPGVGFAMGVERLVLLLETLGVIPAELNRPADLYVCAFGEPAELAALTLAEQLRSAIPGIRLLVNAGAGSFKSQFKKADKSGARFALILGEDEVANRVVGFKPLRDEGEQQSIAWDALPEHLAACLAQA

SEQ ID NO: 11957 - protein, 258 aa, Pseudomonas aeruginosa
MFERVREDIQSVFHRDPAARNALEVLTCYPGLHAVWLHRLAHGLWTSGWKWLARLVSNFGRWMTGIEIHPGARIGRRFFIDHGMGIVIGETAEIGDDVTLYQGVTLGGTTWNKGKRHPTLGNNVVVGAGAKVLGPFTVGEGAKVGSNAVVTKEVPPGATVVGIPGRIIMREDSEQQAKRQAMAEKLGFDAYGVSQDMPDPVARAIGQLLDHLQAVDGRLEGMCQALTALGSDYCAKDLPVLREEDFAGVKDEDGNPAA

SEQ ID NO: 11958 - protein, 372 aa, Pseudomonas aeruginosa
MNFELLATDGKARRGRLTFPRGVVETPAFMPVGTYGTVKGMLPRDIEDIGAQIILGNTFHLWLRPGTEVIQRHGDLHDFMQWKGPILTDSGGFQVFSLGAMRKIKEEGVTFASPVDGAKVFMGPEESMAVQRALGSDIVMIFDECTPYPADHDVAKRSMELSLRWAKRSKIAHGDSPSALFGIVQGGMHEDLRLRSLDGLQEIGFDGLAIGGLSVGEPKEEMIRVLDFLPPQMPADKPRYLMGVGKPEDLVEGVRRGVDMFDCVMPTRNARNGHLFVDSGVIKIRNSVHKHDDSTLDPTCDCYTCKHFSRAYLHHLDKCGEMLGSMLNTIHNLRHYQRVMAGLREAIQQGTLAAFVDAFYAKRGLPTPPLDA

SEQ ID NO: 11959 - protein, 347 aa, Pseudomonas aeruginosa
MRVADFHFDLPEALIARHPLPERRASRLLALDGPTGTLAHRQFADLLDYLRPGDLMVFNNTRVIPARLFGQKESGGKLEVLVERVLDQHRVLAHIRASKAPKPGTRILVEGGGSAEMLQRHDALFELAFAEPVLPLLERVGHMPLPPYIDRPDDAADRERYQTVYAQRAGAVAAPTAGLHFDEALLEAIRAKGVDTAFVTLHVGAGTFQPVRVERIEDHVMHREWLEVGQDVVDAVSVCRARGGRVVAVGTTSVRSLESAARDGELKPFSGDTDIFIYPGRPFHVVDALVTNFHLPESTLLMLVSAFAGYPETMAAYAAAVAQGYRFFSYGDAMFITRNPAPRGPED

SEQ ID NO: 11960 - protein, 495 aa, Pseudomonas aeruginosa
MEFLVKSVRPETLKTATLVLAVGEGRKLGASAKAVDDATGGAISAVLKRGDLAGKVGQTLLLQSLPNLKAERVLLVGAGKERELGDRQYRKLASAVLSTLKGLAGADAALALGDLAVKGRDAHAKARLLVETLADGLYVFDRYKSQKAEPLKLKKLTLLADKADSAAVEQGSKEAQAIANGMALTRDLGNLPPNVCHPTFLGEQAKGLAKEFKGLKVEVLDEKKLRELGMGSFLAVAQGSDQPPRLIVLQYNGAKKDQAPHVLVGKGITFDTGGISLKPGLGMDEMKFDMCGAASVFGTFRAVLELQLPINLVGLLACAENMPSGGATRPGDIVTTMSGQTVEILNTDAEGRLVLCDALTYAERFKPQSVIDIATLTGACIVALGSNTSGLMGNNEALVRQLLKAGEFADDRAWQLPLFDEYQEQLDSPFADIANIGGPKAGTITAGCFLSRFAKKYHWAHLDIAGTAWISGGKDKGATGRPVPLLTQYLLERAK

SEQ ID NO: 11961 - protein, 950 aa, Pseudomonas aeruginosa
MDKTYQPHAIETSWYETWESNDYFAPSGEGQPYTIMIPPPNVTGSLHMGHGFNNAIMDALIRYRRMQGRNTLWQPGTDHAGIATQMVVERQLGAQGVSRHDLGREKFLEKVWEWKEQSGGNITRQIRRLGSSVDWSRERFTMDDGLSEAVKEAFVRLHEDGLIYRGKRLVNWDTKLHTAISDLEVENHDEKGHLWHLRYPLVNGAKTSEGLDYLVVATTRPETLLGDAAVAVHPEDERYAKLIGQFAELPIVGRHIPIIADEYVDREFGTGCVKITPAHDFNDYEVGKRHDLPLINIFDKNAAVLAQAQVFHLDGSVNPNLDPSLPQSYAGMDRFAARKAIVAEFEAMGLLEKVDDHALKVPKGDRSGTVIEPWLTDQWYVSTKPLAEDAIAAVEDGRIQFVPKQYENMYFSWMRDIQDWCISRQLWWGHRIPAWYDEAGNVYVGRDEVEVRTKHKLGNEAELRQDEDVLDTWFSSGLWTFSTLGWPQQTEFLKTFHPTDVLVTGFDIIFFWVARMIMLTMHLVKNPDGTPQIPFKTVYVHGLVRDGQGQKMSKSKGNVLDPLDIVDGIDLDTLLQKRTSGMMQPKLAEKIAKQTRAEFPEGIASYGTDALRFTFCSLASTGRDIKFDMGRVEGFRNFCNKIWNAANFVIENTDGQDTGVNGEPVELSSVDRWIISQLQRTEQEVTRQLDAFRFDLAAQALYEFIWDEYCAWYLELVKPVLWDENAPIERQRGTRRTLIRVLETALRLAHPFMPFITEEIWQRIKGQAGKEGPTLMLQPWPVADEGRIDAAAEGDIEWVKALMLGVRQIRGEMNISMAKRIDIILKNASPSDHRRLADNEPLLMKLAKLESIRVLEAGEEAPMSATALVGDMEVLVPMAGLIDKSAELGRLDKEIQRLEGEVKRVGGKLSNEGFVAKAPADVIEKERAKLAEAEQALAKLAEQRQKIAAL

SEQ ID NO: 11962 - protein, 229 aa, Pseudomonas aeruginosa
MGYLKNHWWKRWIRRRGCKLAGGPASVGKRTTLVLEERVELGHLRIVPPRLEIGAYSYVRSGTDLSLVASIGRFCSIGSDCFIGQEKHTHPSDWVSSHPFQHTGTALRYEPALSYAEIGHDVWIGHSAMVMEGVKVGTGAIIATRAVVTRDVPPYAIVAGTPAQVIRYRHPPEIIEGLLASRWWELDSAFLTGLPLDRPREFLAALEAREAPRAAYRRMTITRQGCRLD

SEQ ID NO: 11963 - protein, 1261 aa, Pseudomonas aeruginosa
MSHLLDRLQFFKKKQGEFADGHGETSNESRAWEGAYRQRWQHDKIVRSTHGVNCTGSCSWKIYVKNGLITWETQQTDYPRTRPDLPNHEPRGCPRGASYSWYIYSANRLKYPKVRKPLLKLWREARAQHGDPVNAWASIVEDAAKAKSYKSQRGLGGFVRSSWDEVTEIIAAANVYTAKTYGPDRVIGFSPIPAMSMVSYAAGARYLSLIGGVCLSFYDWYCDLPPASPQIWGEQTDVPESADWYNSSYIIAWGSNVPQTRTPDAHFFTEVRYKGTKTVSITPDYSEVAKLTDLWLNPKQGTDAALGMAFGHVILKEFHLDRPSAYFVDYCRQYTDMPMLVLLEEHAGGAFKPTRYLRAADLADNLGQDNNPEWKTIAYDERSGGLVSPTGAIGYRWGESGKWNIAELDGRSGDQTRLQLSLLDGPEHACEVAFPYFAGQEHPHFKGVANDEVLLRRVPFREIVAADGKRLRVATVYDLQMANYSIDRGLGGDNVATSYEDADTPYTPAWQERITGVPAARATQVAREFADSADKTRGKAMVIIGAAMNHWYHMDMNYRAVINMLMMCGCIGQSGGGWAHYVGQEKLRPQTGWAPLAFGLDWSRPPRQMNGTSFFYLHSSQWRHEKLSMHEVLSPLADASRFAEHALDYNIQAERLGWLPSAPQLNRNPLRIAAEAEAAGLPVADYVVRELKSGGLRFASESPDDPQNFPRNMFIWRSNLLGSSGKGHEYMLKYLLGAKNGVMNDDLGKAGGPRPTEVDWVDDGAEGKLDLVTTLDFRMSSTCMYSDIVLPTATWYEKDDLNTSDMHPFIHPLSAATDPAWEAKSDWEIYKAIAKKFSAVAEGHLGVEQDLVTVPLLHDTPTELAQPFGGDGHDWKKGECEPVPGRNLPTLHLVERDYPNVYRKFTSLGPLLDKLGNGGKGIGWNTEKEVKLVGDLNHRVVESGVSQGRPRIDSAIDAAEVVLALAPETNGQVAVKAWEALSKITGREHAHLALPKEDEKIRFRDIQVQPRKIISSPTWSGLEDEHVSYNAGYTNVHELIPWRTITGRQQFYQDHPWMQAFGEGFVSYRPPVNTRTTEKLLNRKPNGNPEITLNWITPHQKWGIHSTYSDNLLMLTLSRGGPIIWLSEHDAAKAGIVDNDWVEVFNANGAATCRAVVSQRVKDGMVMMYHAQERIVNVPGSETTGTRGGHHNSVTRVVLKPTHMIGGYAQQAWGFNYYGTVGCNRDEFVVVRKMSKVDWLDEPRHGGLGGDALPQPLPQDI

SEQ ID NO: 11964 - protein, 387 aa, Pseudomonas aeruginosa
MIELDKLSKTFTQKNGKEFRAVDSVSLTVEKGEICVFLGPSGCGKTTTLKMINRIIPPTSGRVLIDGQDTADLDEVTLRRHIGYVIQQIGLFPNMTIEENIMVVPRLLGWDKARCKEKARELMSMVKLEPKQYLQRYPRELSGGQQQRVGVIRALAADAPLLLMDEPFGAVDPINRESIQNEFFEMQRKLGMTVIMVSHDIDEAIKLGDKVAVFKSGRLLQYDHPDTLLAHPADEFVSAFTGQDSTLKRLLLVRAEDAADSSLVTARPQTPVAEALELMDENDRRYLIVVDDQGKGLGYVRRKDLRRQEGTCAPFVTPFRVTASHDEHLRILLSRMYEFNSSWLPVLDPDQQFLGEVTQESIADYLSSGRSRGGKGLIVSPAEQVGA

SEQ ID NO: 11965 - protein, 407 aa, Pseudomonas aeruginosa
MSACACDGGQLRPLDEALAELLARAPRPPACESLALERALGRVLGEDLLAPMDLPHWDNSAMDGYALCSADLPRSGGSLTVGARIAAGDTRGMSLPLGQAARIFTGAPLPTGADCVVPQELCVVDGERVQLPPVSAGQHVRRRGEELRRGAPVLRAGQRLRPQELGLLASLGVATVSVRRRLRIGLLSSGDELREPGQTLLAGQIYNANRYCIGALLRGLGFEVHDEEVLADELVASRDALSLAASEWDALVTSGGVSVGEEDHLKRAIAELGEVNLWRLAIQPGKPFAFGSVAGKPWLGLPGNPAAALVTALLVARPFLLRQQGLFDVVPRPLALPAAFDWPQPRARRQYLRARLDERGRVEIHPQQGSAMLLAASWADGLAVIERGATLGVGDAIDFLPFSALMA

SEQ ID NO: 11966 - protein, 792 aa, Pseudomonas aeruginosa
MNSATLTELDLPVSGMTCASCAGRVERALKKVPGVAAASVNLASEQARVQAPADSLPALVAAVEQAGYQVPARSLELSIEGMTCASCVGRVERALKKVPGVREVSVNLASERAHLELLGAVDSQALLQAVEQAGYKARLLDAGQPRQDDAERRLRRERWWVIAALLLALPLVLPMLVEWAGLHWMLPPWAQFLLATPVQFVIGARFYVSAWRAVKAGAGNMDLLVALGTSAGYGLSVYLWLTAPPGHMPHLYFEASTVVIALILLGKYLESRAKRQTASAIRALEALRPERAVRLRDGREEEVAIAELRLGDEVVVRPGERFPVDGEVLDGSSHADEALITGESLPVPKAPGDKVTGGAINGEGRLLLRTTALGGETVLAKIIRLVEDAQAAKAPIQKLVDKVSQVFVPVVILIALVTLGAWLVAGVGLEQALVNAVAVLVIACPCALGLATPTAIMAGTGVAARHGILIKDAESLEVAHAVTSVAFDKTGTLTSGRPQIIHLGGDDQEQLLRLAGALQRGSEHPLAKAVLERCAERDLEVPPVNASQALSGRGIQGEVEGRRLALGNRRLLDEQELKPGALASAAADWEAEGRTLSWLLELAPEKRVLGLFAFGDSLKDGAAEAVEALRGRDIHSHLITGDNRGSAAVVAKALGIDDVHAEVLPADKAATVAELKGRGRVVAMVGDGINDAPALAAADVGIAMGGGTDVAMHAAGITLMRGDPRLVPAALDISRRTYAKIRQNLFWAFIYNVIGIPLAAFGLLNPMVAGAAMAFSSVSVVGNALLLRRWKP

SEQ ID NO: 11967 - protein, 209 aa, Pseudomonas aeruginosa
MKLRGLYAITDSQLLDDGRLLPYVEAALRGGARLLQYRDKSSDQARRLREAESLRELCERHGAQLIVNDDAELAARLGVGLHLGQTDGSLSAARALLGRQAIIGATCHAQLELAEQAVAEGASYVAFGRFFNSSTKPGAPAASVELLDQARPRLHLPITAIGGISLDTAPGLIARGVDLVAVIHALFAAASAAEVERRARAFSALFEPA

SEQ ID NO: 11968 - protein, 427 aa, Pseudomonas aeruginosa
MSRSETLFNNAQKHIPGGVNSPVRAFKSVGGTPLFFKHAEGAYVLDEDDKRYVDYVGSWGPMILGHSHPDVLDAVRRQLDHGLSYGAPTALEVEMADLVCSMVPSMEMVRMVSSGTEATMSAIRLARGYTGRDSIIKFEGCYHGHSDSLLVKAGSGALTFGVPNSPGVPAAFAKHTLTLPFNDIEAVRKTLGEVGKEVACIIVEPVAGNMNCVPPAPGFLEGLREACDEHGVVLIFDEVMTGFRVALGGAQAYYGVTPDLSTFGKIIGGGMPVGAFGGKREIMQQISPLGPVYQAGTLSGNPLAMAAGLTTLRLISRPGFHDELTAYTTRMLDGLQQRADAAGIPFVTTQAGGMFGLYFSGADAIVTFEDVMASDVERFKRFFHLMLDGGVYLAPSAFEAGFTSIAHGDKELEITLNAAEKAFAALK

SEQ ID NO: 11969 - protein, 873 aa, Pseudomonas aeruginosa
MHEQYQPLEIETQAQNYWKEHQSFLVRELPDKEKFYCLSMFPYPSGKLHMGHVRNYTIGDVISRYHRMQGRNVLQPMGWDAFGMPAENAAMKNNVAPAAWTYDNIAYMKSQLDSLGLAIDWSREVTTCKPDYYRWEQWLFTRLFEKGVIYRKNGTVNWDPVDQTVLANEQVIDGRGWRSGALIEKREIPMYYFKITAYAEELLESLDNLPGWPEQVKTMQRNWIGKSRGMEIGFPYDQASIGHAGQLKVFTTRPDTLMGATYVAVAAEHPLATQAAQNDPQLQAFIDECKRGGVAEADIATQEKKGMATSLFVEHPLTGDKLPVWVANYVLMNYGEGAVMAVPGHDERDFEFANKYGLPIRQVIAKVEGDNDFESSVWKEWYGAKDESVLTVNSGKYDNLGYQAAFDAIGADLEAKGLGQARTQFRLRDWGISRQRYWGCPIPIIHCEACGDVPVPADQLPVVLPEDVVPDGSGSPLAKMPEFYECNCPKCGQPAKRETDTMDTFVESSWYFARYACPQFEGGMLDRKAADYWLPVDQYIGGIEHAILHLLYARFFHKLMRDEGLVGSDEPFKNLLTQGMVVADTYYRTTANGGKDWFNPADVEVERDAKAKVVGARLKSDGQPVEIGGTEKMSKSKNNGVDPQSMIDQYGADTCRLFMMFASPPDMSLEWSDAGVEGANRFLRRVWRLAHAHVSAGLPGALDVAALSDAQKQVRRAIHLAIRQASQDVGQHHKFNTAIAAVMTLMNVLEKAPNQDAQDRALIQEGLETVVLLLAPITPHICHVLWGQLGHAEAVIDARWPSVDESALVQDTLQLVVQVNGKLRGHIDVAASASREDVEAAARANENVLRFTEGLSIRKVIVVPGKLVNIVAN

SEQ ID NO: 11970 - protein, 327 aa, Pseudomonas aeruginosa
MSTVVEKSGEAKPGKVEVGVKLRGAEKVARIPVKIIPTEELPKKPDWIRVRIPVSPEVDRIKQLLRKHKLHSVCEEASCPNLGECFSGGTATFMIMGDICTRRCPFCDVGHGRPKPLDVDEPTNLAIAIADLRLKYVVITSVDRDDLRDGGAQHFADCLREIRKLSPGIQLETLVPDYRGRMDIALEITANEPPDVFNHNLETVPRLYRSSRPGSDFEWSLDLLQKFKQMVPHVPTKSGLMLGLGETDDEVIEVMQRMREHDIDMLTLGQYLQPSRNHLPVQRFVHPDTFAWFAEEGEKMGFKNVASGPLVRSSYHADQQAHGNKIG

SEQ ID NO: 11971 - protein, 295 aa, Pseudomonas aeruginosa
MIAAYQARCQARVDAALDALFVAPREELQRLYEAMRYSVMNGGKRVRPLLAYAACEALGGAPQRADAAACAVELIHAYSLVHDDLPAMDDDDLRRGQPTTHRAFDEATAILAADGLQALAFEVLADTRRNPQEHAVCLEMLTRLARAAGSAGMVGGQAIDLGSVGVALDQAALEVMHRHKTGALIEASVRLGALASGRAEPASLAALERYAEAIGLAFQVQDDILDVESDTATLGKTQGKDQAHNKPTYPALLGLEAAKGYALELRDLALAALDGFPPSADPLRQLARYIVERRN

SEQ ID NO: 11972 - protein, 365 aa, Pseudomonas aeruginosa
MALNTIDELIEDIRQGKMVILMDDEDRENEGDLIMAAECVRTEDINFMVKHARGLVCMPMTRERCERLGLPLMVQRNGSGFGTKFTVSIEAAEGVTTGISAADRARTVQAAAAKNAVAADIVSPGHIFPLMAQPGGTLARAGHTEAACDLARMAGFEPSGVICEVMNDDGSMARRPELEAFAAEHGIKIGTIADLIHYRLIHERTVERIAEQPLDSELGHFNLITYRDSVEGDVHLALTLGKVCAEEPTLVRVHNMDPLRDLLQVNQPGRWSLRAAMTKVAEAGSGVVLLLGHQIGGDDLLAHVREIASAPAPAPKATTTYSTVGAGSQILRDLGVRKMRLLSAPMRFNAISGFDLEVVEYLPAE

SEQ ID NO: 11973 - protein, 219 aa, Pseudomonas aeruginosa
MFTGIIESIGSVRAMTPKGGDLRVYIATGKLDLGDVKLGDSIAVNGVCLTAVELPGDGFWADVSRESLARTAFQHLKVGSRVNLEKALTPTTRLGGHLVSGHVDGVGEVLKREENARAIQFTVRAPRELARYIAHKGSITVDGTSLTVNAVNGAEFELTIVPHTLSETIMAEYQPGRRVNLEVDLLARYLERLLLGDKAAEPSASGISEAFLAENGFLK

SEQ ID NO: 11974 - protein, 373 aa, Pseudomonas aeruginosa
MNAADPLYMARALELARQGLYSTQPNPRVGCVLVKDGQVVGEGWHVRAGEPHAEVHALRQAGENARGATAYVTLEPCSHFGRTPPCADALVGAGVARVVAAMQDPNPEVAGRGLLRLMQAGIAVQSGVLEAEARELNIGFIKRMEHGLPFVRVKLAMSLDGRTAMASGESQWITGPSARSAVQRLRARSSVVLSGADTLLADDARLNVRPDELGLNAELTALAAARQPLRVLVDGRLRVPLESAFYQAGPALVATCAAASARERFQDAGHELLALPSAEGHVDLHKLLLELAARGANEVLVEAGPRLAGAFARLGLVDEYRLFVAPKFLGSSARPLLDWPLARMADAAQLRIDDIRAVGDDWLVTARPHLRDA

SEQ ID NO: 11975 - protein, 352 aa, Pseudomonas aeruginosa
MKALRWHAARDLRLSELERQAPRPGEVELEVAYCGICGSDLHEYQSGPHSIPQAEAHPLSGCRAPLTLGHEFCGVVAALGPGVEGPRIGDRVAVEPEYRCGECRYCREGRYNLCESMGFIGLMGDGGFAERARVPAYMLHRLPDAVGFRQAAVLEPAAVALHALRRSSLAPGQRCAVFGLGPIGLLLVMLARLRGIEDIAAVDVSPERLALAGEFGASRALDARDGDTAARLREGGALDCAFEAAGSQASLDAALASLRKGGELVLVSLMGEVRLDAFDLVNRELRLLGSVGYRDAYPELIALLADGRLDLARAVTRSVPLEQAVEHGFEALLRDKSQLKVLVNPNPALADA

SEQ ID NO: 11976 - protein, 259 aa, Pseudomonas aeruginosa
MKHARIRYQGRVHQVTVEDANAVRLADGTLLAEDRVEWLPPATGSMFALGLNYADHAAELSFKAPSEPLAFLKSPGTYTGHRQVSWRPDNVDYMHYECELVAVIGKPARNVRREDALGYLAGYTVCNDYAIRDYLENYYRPNLRVKNRDATTPVGPWIVDAAEVPEPNRLTLRTWVNGELRQEGSTADMIFDIPYLIEYFSSFMTLQPGDMIATGTPEGLSDVVPGDEVVVEVEGVGRLVNRIVSEAEFFRARAQEHAE

SEQ ID NO: 11977 - protein, 268 aa, Pseudomonas aeruginosa
MDLPVNRFKQRLRSGEAQIGLWLGLADPYCAELAANAGFDWLLLDGEHAPNDLRSLLGQLQALAPYPGQPVIRPVQGDTALIKQLLDIGAQTLLVPMVDSAAQAEGLVRAVRYPPAGVRGVGSALARASRWNSVAEYLNHADEQMCLLVQVENLEGLANLDAIAAVEGVDGVFIGPADLSAAMGHRGNPGHPEVQAAIEDAIHRIRTAGKAAGILSADETLARRYLELGCAFVAVGVDTSLLMRSLRELAGRFKGGAPAPSASSSVYG

SEQ ID NO: 11978 - protein, 412 aa, Pseudomonas aeruginosa
MSVPTHQQDLIALLEERGFVHQCTDRDGLAAHLAAGPATAYLGFDATADSLHVGHLQGLMLMRWLQKAGHRPLLLIGGATTRIGDPSFRDSSRPILTEAQIQANIDGIARVFSRYVELHDDSLVNNAEWLDGVGYLEFLDRVGRHFSINRLLTFDAIRQRLDREHSLSFLEFGYTLLQAYDFVELSRRRGCTLQLGGADQWANIINGVELSRRQGGAQLFGLTMPLLATSDGRKMGKSAQGAVWLNAERLAPFDFWQFWRNCDDRDVGRFLALFSELPMDEVRRLGALQGAELNEAKVVLANAATALAHGEHAARSAADAARGVFADGTRDSGLPVMKLSRARLAQGLSLTDLLLEHAIQPSRSAVRRLAAGGGLRLDGTPVSDPDTPLAGEVDGLRLSLGKKQHLHLRLED

SEQ ID NO: 11979 - protein, 363 aa, Pseudomonas aeruginosa
MNSSPQANAAMRAAVWHGRHDIRVEDVPLPAEPPPGWVQIRVHWCGICGSDLHEYLAGPVFIPVEAPHPLTGLKDQCILGHEFSGEIVRLGNGVTGFAVGQAVAADACQHCGTCYYCRHGLYNICENLAFTGLMNNGAFAEYVNVPANLLYALPAGFPSEAGALIEPLAVGMHAVKKAGSLLGQNVVVVGAGTIGLSTIMCARAAGAAQVIALEMSSARKAKALEVGASQVLDPSRCDALGEIRALTGGLGADVSFECIGNKHTAKLAIDAIRKAGKCVLVGIFEEPSEFNFFELVSTEKQLLGALAYNGEFADVIAFIADGRLDIAPLVTGRIGLEEIVERGFEELVNNKEHNVKIIVSPGG

SEQ ID NO: 11980 - protein, 340 aa, Pseudomonas aeruginosa
MQASPMRRRRLRAWGLLAGALLLALAALASLALGSRPVPLAVTLDALQAVDPHDDRHLVVRELRLPRTLVALLAGAALGVAGALMQALTRNPLAEPGLLGINAGAALAVIVGVALFDLASMGQYLGCAFLGAGLAGIAVFLLGQARETGTNPVRLVLAGAGLSVMLASLTGIIVLNAPPEVFDRFRHWAAGSLSGSGFALLGWPGLAIGAGLAAAFALAARLNALALGQEIGQALGVDLRLTWLLACLAVMLLAGAATALAGPIAFVGLVAPHLARLLAGPDQRWILPFSALIAAGLLLGADILGRLLAAPTEIAAGIVALLLGGPAFIVLVRRFRLSRL

SEQ ID NO: 11981 - protein, 272 aa, Pseudomonas aeruginosa
MSSTIHPLPSFGLGTFRLTGQVVVDSVRSALELGYRAIDTAQIYGNEADIGRAIAESGVPRSELFLTTKVWVDNYAREKLLASLRESLEKLRTDRLDLVLIHWPAPGNGVELGEYMAALAEAKSLGLTRRIGVSNFNIELTRQAIAAVGAGEISTNQIELSPYLQNRALTAYLEEQGIAVTSYMTLAYGKVLKDPTLAGIAARHRATVAQVALAWAMQLGYAVIPSSTRRENLASNLLARDLRLDAEDMARIAGLERNGREVSPQGLAPAWD

SEQ ID NO: 11982 - protein, 547 aa, Pseudomonas aeruginosa
MAKAADVVVQCLENEGVQYVFGIPGEENLDLLESLRKSQIRLVLTRHEQSAGFMAATYGRLTGKTGVSLSTLGPGATNLVTAGAYAYLGGMPMLMITGQKPIKKSKQGRFQILDVVGMMQPLTKYTHQLASADNIPSRVREAFRLAEEEKPGAVHLELPEDIAAEQTDSLPIPPSLSRRPLAEYKAICAAVEKLRAARSPILVIGAGANRKMTAKVLKQLIDKTGIPFVTTQMGKGVVDERHPRFLGNAALSAGDFVHRAVEAADLIVNVGHDVIEKPPFFMVRGGTEVIHVNFRSAEVDPVYFPQIEVVGDIANAIWQIGEALDDTAHWDFTRLLAIREANEAQVAEGADDPRFPLYPQRLVADVRRALPSQGIVALDNGMYKIWFARNYKAHMPNTVLLDNALATMGAGLPSAMAAHLVYPDRPIVAVCGDGGFMMNSQELETAVRLKMNLTVIILRDNGYGMIRWKQSNMGFADFGLDYGNPDFVHYAEAYGAHGHRVDSAEGFLPLLERCLGTPGVHVIDCPVDYSENDRILNVELRERALAV

SEQ ID NO: 11983 - protein, 346 aa, Pseudomonas aeruginosa
MGQDKLKVAVLFGGSSEERDVSIASGAQVIQALRSAGHQVLAVDTASGLLGAEEERRLLASKVKEVPPDSDSLAIIRSGKQSLLSAGELAGVDVFFLALHGGTGEDGTLQALLDAGGFAYTGSGHLASAMAMDKDVAKRLFLAAGVETASWLMAPASEEEVREQLGFPLVVKPNSQGSTVGLSIVHSQAELQPAIELAGRYGDEVMLERFVAGREVTVGVLDDQALPVGEILLGGQEVFDYEHKYQAGAVREVFPADLPPAIAAEAQRLALKVHRALKLSGYSRTDFRLDEQGRLWCLEVNTLPGMTATSLLPQAAAAAGIGFAELCERICRLGIERCKGARKARS

SEQ ID NO: 11984 - protein, 351 aa, Pseudomonas aeruginosa
MTDRFTRLLGIQQPIIQAPMLGVSTPALAAAVSNAGGLGSIAITGSAAEKGRALIREVRGLTDKPFNVNLFCHRPGQADPARERAWLDYLKPLFAEFGAEPPVRLKNIYLSFLEDPTLLPMLLEERPAAVSFHFGAPPRDQVRALQAVGIRVLVCATTPEEAALVEAAGADAVVAQGIEAGGHRGVFEPERGDAAIGTLALVRLLAARGSLPVVAAGGIMDGRGIRAALELGASAVQMGTAFVLCPESSANAAYREALKGPRAARTALTVTMSGRSARGLPNRMFFDAAAPGVPPLPDYPFVYDATKALQTAALARGNHDFAAQWAGQGAALARELPAAELLRTLVEELRG

SEQ ID NO: 11985 - protein, 165 aa, Pseudomonas aeruginosa
MARGVNKVILVGNVGGDPETRYMPNGNAVTNITLATSESWKDKQTGQQQERTEWHRVVFFGRLAEIAGEYLRKGSQVYVEGSLRTRKWQGQDGQDRYTTEIVVDINGNMQLLGGRPSGDDSQRAPREPMQRPQQAPQQQSRPAPQQQPAPQPAQDYDSFDDDIPF

SEQ ID NO: 11986 - protein, 945 aa, Pseudomonas aeruginosa
MDKILIRGARTHNLKNVDLTLPRDKLIVITGLSGSGKSSLAFDTLYAEGQRRYVESLSAYARQFLSMMEKPDVDTIEGLSPAISIEQKSTSHNPRSTVGTITEIYDYLRLLYARVGTPRCPDHDIPLEAQTVSQMVDQVLALPEGSKLMLLAPVIRERKGEHLAVFDEMRAQGFVRARVDGKLYELDEVPKLDKQKKHSIDVVVDRFKVRADLQQRLAESFETALSLADGIALVAPMDEDEDVEEIIFSARFACPVCGHSISELEPKLFSFNNPAGACPTCDGLGVKQFFDARRVVNGELTLAEGAIRGWDRRNVYYFQMLGSLAQHYGFSLEEPFDELGAEHQKVVLYGSGRENVDFRYLNDRGDIVKRSHPFEGILPNLERRYRETESATVREELAKFLSTQPCPDCHGTRLRREARHVWVGDRTLPAITAMPVGEACEYAAGLSLTGRRGEIAAKILKEIRDRLQFLVNVGLDYLTLDRSADTLSGGEAQRIRLASQIGAGLVGVMYILDEPSIGLHQRDNERLLGTLTHLRNLGNTVIVVEHDEDAIRLADYVVDIGPGAGVHGGQVVAEGTPDQVMNHPDSLTGKYLSGRKKIAVPAKRTPRDKKKLLKLKGARGNNLQNVNLEIPVGLFTCITGVSGSGKSTLINNTLFPITATALNGATTLEVAPYDSFDGLQHLDKVVDIDQSPIGRTPRSNPATYTGLFTPIRELFSGVPEARSRGYGPGRFSFNVKGGRCEACQGDGVIKVEMHFLPDIYVPCDVCKGKRYNRETLEIRYKGKSIHEVLEMTIEEAREFFDAVPALARKLQTLMDVGLSYIKLGQSATTLSGGEAQRVKLSRELSKRDTGKTLYILDEPTTGLHFADIQQLLDVLHRLRDHGNTVVVIEHNLDVIKTADWLVDLGPEGGSKGGQIIANGTPEQVAEMPQSHTGHFLKPLLERDRA

SEQ ID NO: 11987 - protein, 333 aa, Pseudomonas aeruginosa
MQSSVNEFLTPRHIDVQVVSQTRAKITLEPLERGFGHTLGNALRRILLSSMPGCAVVEAEIDGVLHEYSAIEGVQEDVIEILLNLKGLAIKLHGRDEVTLTLAKKGSGVVTAADIQLDHDVEIINGDHVIANLADNGALNMKLKVARGRGYEPADARQSDEDESRSIGRLQLDASFSPVRRVSYVVENARVEQRTNLDKLVLDLETNGTLDPEEAIRRAATILQQQLAAFVDLKGDSEPVVEEQEDEIDPILLRPVDDLELTVRSANCLKAENIYYIGDLIQRTEVELLKTPNLGKKSLTEIKDVLASRGLSLGMRLDNWPPASLKKDDKATA

SEQ ID NO: 11988 - protein, 206 aa, Pseudomonas aeruginosa
MARYIGPKCKLSRREGTDLFLKSGARALDSKCKAENVPGQHGQRRGRLSDYGLQLREKQKVRRIYGVLERQFRGYYQEASRRKGSTGENLLQLLECRLDNVVYRMGFGSTRSESRQLVSHKAITVNGQTVNIPSYQVKAGDVVAVREKSKNQLRIAQALELCGQRGRVEWVEVDLDKKAGTFKSAPARSDLSADINENLIVELYSK

SEQ ID NO: 11989 - protein, 129 aa, Pseudomonas aeruginosa
MAKPAARPRKKVKKTVVDGIAHIHASFNNTIVTITDRQGNALSWATSGGSGFRGSRKSTPFAAQVAAERAGQAALEYGLKNLDVNVKGPGPGRESAVRALNACGYKIASITDVTPIPHNGCRPPKKRRV

SEQ ID NO: 11990 - protein, 118 aa, Pseudomonas aeruginosa
MARIAGVNIPDNKHTVISLTYIYGVGRTTAQSICAATGVNPAAKIKDLSDEQIDQLRNEVAKITTEGDLRREINMNIKRLMDLGCYRGLRHRRGLPVRGQRTKTNARTRKGPRKPIRK

SEQ ID NO: 11991 - protein, 442 aa, Pseudomonas aeruginosa
MAKQGALSALSNGGLSELWARLRFLFLAIIVYRIGAHIPVPGINPDRLAALFRQNEGTILSLFNMFSGGALERMSIFALGIMPYISASIIMQLMTAISPQLEQLKKEGESGRRKISQYTRYGTVVLALVQAIGMSVGLGSQGVAFSNDFGFYFVAVTTFVAGAMFMMWLGEQITERGVGNGISMLIFAGIVAGLPRAIGQSFESARQGDINIFALIGVGLLAVAIIAFVVFIERGQRRIAVHYAKRQQGRKVFAAQTSHLPLKVNMAGVIPAIFASSILLFPASLGSWFGQSEGLGWLQDVAQAIAPGQPLNILLFTAGIVFFCFFYTALMFNPKDVAENLKKSGAFIPGIRPGEQSARYIDGVLTRLTMFGALYMTAVCLLPQFLVVAAHVPFYLGGTSLLIVVVVVMDFMAQVQSHLVSHQYESLMKKANLKGYGSGMLR

SEQ ID NO: 11992 - protein, 63 aa, Pseudomonas aeruginosa
MKANELREKSVEQLNEQLLGLLRDQFNLRMQKATGQLGQSHLLSQVKRDIARVKTVLNQQAGK

SEQ ID NO: 11993 - protein, 273 aa, Pseudomonas aeruginosa
MAIVKCKPTSAGRRFVVKVVNQELHKGAPYAPLLEKKSKSGGRNNNGRITTRHIGGGHKQHYRLVDFRRNKDGIPAIVERVEYDPNRTAHIALLKYADGERRYIIAPKGVAAGDQLISGIGAPIKAGNSMPLRNIPVGSTVHGIELKPGKGAQIARSAGASAQLVAREGAYVTLRLRSGEMRKVLAECRATLGEVSNSEHSLRSLGKAGATRWRGVRPTVRGVAMNPVDHPHGGGEGRTSAGRHPVSPWGLQTKGKKTRSNKRTDNMIVRRRK

SEQ ID NO: 11994 - protein, 99 aa, Pseudomonas aeruginosa
MNQERVFKVLLGPHISEKATGLADGKSQFVFKVATDATKLEIKKAVESLFSVKVQRVTTLNVKGKTKRTARGLGKRNDWKKAYIALQPGQDLDFATSAE

SEQ ID NO: 11995 - protein, 397 aa, Pseudomonas aeruginosa
MAKEKFERNKPHVNVGTIGHVDHGKTTLTAALTKVCSDTWGGSARAFDQIDNAPEEKARGITINTSHVEYDSAVRHYAHVDCPGHADYVKNMITGAAQMDGAILVCSAADGPMPQTREHILLSRQVGVPYIVVFLNKADMVDDAELLELVEMEVRDLLNTYDFPGDDTPIIIGSALMALEGKDDNGIGVSAVQKLVETLDSYIPEPVRAIDQPFLMPIEDVFSISGRGTVVTGRVERGIIKVQEEVEIVGIKATTKTTCTGVEMFRKLLDEGRAGENVGILLRGTKREDVERGQVLAKPGTIKPHTKFECEVYVLSKEEGGRHTPFFKGYRPQFYFRTTDVTGNCELPEGVEMVMPGDNIKMVVTLIAPIAMEDGLRFAIREGGRTVGAGVVAKIIE

SEQ ID NO: 11996 - protein, 156 aa, Pseudomonas aeruginosa
MPRRRVAAKREVLADPKYGSQILAKFMNHVMESGKKAVAERIVYGALDKVKERGKADPLETFEKALDAIAPLVEVKSRRVGGATYQVPVEVRPSRRNALAMRWLVDFARKRGEKSMALRLAGELLDAAEGKGAAVKKREDVHRMAEANKAFSHYRF

SEQ ID NO: 11997 - protein, 1357 aa, Pseudomonas aeruginosa
MAYSYTEKKRIRKDFSKLPDVMDVPYLLAIQLDSYREFLQAGATKEQFRDVGLHAAFKSVFPIISYSGNAALEYVGYRLGEPAFDVKECVLRGVTFAVPLRVKVRLIIFDRESSNKAIKDIKEQEVYMGEIPLMTENGTFIINGTERVIVSQLHRSPGVFFDHDRGKTHSSGKLLYSARIIPYRGSWLDFEFDPKDCVFVRIDRRRKLPASVLLRALGYSTEEILNAFYATNVFHIKGETLNLELVPQRLRGEVASIDIKDGSGKVIVEQGRRITARHINQLEKAGVSQLEVPFDYLIGRTIAKAIVHPATGEIIAECNTELTLDLLAKVAKAQVVRIETLYTNDIDCGPFISDTLKIDNTSNQLEALVEIYRMMRPGEPPTKEAAETLFGNLFFSAERYDLSAVGRMKFNRRIGRTEIEGPGVLSKEDIIDVLKTLVDIRNGKGIVDDIDHLGNRRVRCVGEMAENQFRVGLVRVERAVKERLSMAESEGLMPQDLINAKPVAAAIKEFFGSSQLSQFMDQNNPLSEITHKRRVSALGPGGLTRERAGFEVRDVHPTHYGRVCPIETPEGPNIGLINSLATYARTNKYGFLESPYRVVKDSLVTDEIVFLSAIEEADHVIAQASATLNEKGQLVDELVAVRHLNEFTVKAPEDVTLMDVSPKQVVSVAASLIPFLEHDDANRALMGSNMQRQAVPTLRADKPLVGTGMERNVARDSGVCVVARRGGVIDSVDASRVVVRVADDEVETGEAGVDIYNLTKYTRSNQNTCINQRPLVSKGDVVARGDILADGPSTDMGELALGQNMRVAFMPWNGFNFEDSICLSERVVQEDRFTTIHIQELTCVARDTKLGPEEITADIPNVGEAALNKLDEAGIVYVGAEVQAGDILVGKVTPKGETQLTPEEKLLRAIFGEKASDVKDTSLRVPTGTKGTVIDVQVFTRDGVERDSRALSIEKMQLDQIRKDLNEEFRIVEGATFERLRAALVGAKAEGGPALKKGTEITDDYLDGLERGQWFKLRMADDALNEQLEKAQAYISDRRQLLDDKFEDKKRKLQQGDDLAPGVLKIVKVYLAIKRRIQPGDKMAGRHGNKGVVSVIMPVEDMPHDANGTPVDIVLNPLGVPSRMNVGQILETHLGLAAKGLGEKINRMLEEQRKVAELRKFLHEIYNEIGGREENLDELGDNEILALAKNLRGGVPMATPVFDGAKEREIKAMLKLADLPESGQMRLFDGRTGNQFERPTTVGYMYMLKLNHLVDDKMHARSTGSYSLVTQQPLGGKAQFGGQRFGEMEVWALEAYGAAYTLQEMLTVKSDDVNGRTKMYKNIVDGDHRMEAGMPESFNVLIKEIRSLGIDIELETE

SEQ ID NO: 11998 - protein, 231 aa, Pseudomonas aeruginosa
MAKLTKRQKAIAEKVVAGKQYSFEEAAKLLAELSTIKFKESVDVAVNLGVDPRKSDQVVRGATVLPNGTGKSVRVAVFTQGPAAEAALAAGADKVGMDELAAEMKGGDLNYDVVIASPDAMRVVGQLGQILGPRGLMPNPKVGTVTPDVATAVKNAKAGQVRFRTDKNGIIHSSVGKVDFEPAKLQQNVEALLADLKRLKPSSSKGVYVKRVTLSTTMGPGLQIDLASLEA

SEQ ID NO: 11999 - protein, 143 aa, Pseudomonas aeruginosa
MAKKIQAYIKLQVKAGQANPSPPVGPALGQHGVNIMEFCKAFNAKTQGQEPGLPTPVIITVYSDRSFTFETKSTPAAVLLKKAAGITSGSARPNSQKVGTVTRAQLEEIAKTKQADLTAADLDAAVRTIAGSARSMGLNVEGV

SEQ ID NO: 12000 - protein, 177 aa, Pseudomonas aeruginosa
MAKRWYVVHAYSGYEKHVMRSLIERVKLAGMEEEFGEILVPTEEVVEMRNGQKRKSERKFFPGYVLVQMEMNEGTWHLVKDTPRVMGFIGGTADKPAPITDREADAILRRVADSGDKPKPKTLFEPGETVRVIDGPFADFNGVVEEVNYEKSRIQVAVLIFGRSTPVELEFSQVEKV

SEQ ID NO: 12001 - protein, 122 aa, Pseudomonas aeruginosa
MNAKAEAKESRFDLLKWLLVAVLVVVAVVGNQYFSAQPILYRVLGILVLAVIAAFLALQTAKGQAFFSLAKEARVEIRKVVWPSRQETTQTTLIVVAVVLVMALLLWGLDSLLGWLVSMIVG

SEQ ID NO: 12002 - protein, 397 aa, Pseudomonas aeruginosa; identical to SEQ ID NO: 11995

SEQ ID NO: 12003 - protein, 418 aa, Pseudomonas aeruginosa
MAVPADASPLRKLALFVGPGLLVSVGYMDPGNWATAIEAGSRFGYALLFVVVLASFSGMLLQSLCSRLGIATGRDLAQLSRERYRPGVARGQWLLAELSIVATDLAEVLGAALAFHLLLGVSITTGVVLTAFDTLIVLALQGANFRRLEAIVLGLIATIGACFFVELVLIGPYWPDVAAGLRPSWDTLSSQEPLYLAIGILGATVMPHNLYLHSSVVQTRVSGDDAASKRSAIRFSRLDTIGSLSLALLVNAAILILAAAAFHGSGHTEVVEIQDAYHLLDPLVGGALASFLFGFALLAAGQSSTFTGTIAGQVVMEGFLRAKIPCWQRRLITRGLALVPALIGVLWLGEAAVGKLLVLSQVVLSLQLPFALWPLIRFSSDRGLMGEFVNPRWVSALAWSLFGLISAANLTLLYFWFG

SEQ ID NO: 12004 - protein, 406 aa, Pseudomonas aeruginosa
MARHRHIVAWLEEVADDLRSLRQDIHAHPELGFEERRTAALVAECLRGWGYEVHEGIGRTGVVGVLRQGDGTRRLGLRADMDALPIVEATGLGYSSCHGGRMHACGHDGHTAMLLGAARYLAATRRFDGTLVLIFQPAEEGQGGAEAMLADGLLERFPCDALFGMHNMPGLEAGHLGFRAGPMMASQDLLSVTLEGVGGHGSMPHLSVDPLLAASSAVMALQSVVARNVDPQKAAVVTVGALQAGEAANVIPQRAVLRLSLRALDGQVREQVLQRVRQIIELQAASYGCQASIEHYPAYPVLVNSVEETEFARQVGVELAGAEQVDGDTPKLMGSEDFAWMLQRCPGSYLFIGNGRGRPMVHNPAYDFNDDILVRGAAYWGALAETWLAAPAASGLRLTAANNGAA

SEQ ID NO: 12005 - protein, 97 aa, Pseudomonas aeruginosa
MKLRPLHDRVVIRRSEEETKTAGGIVLPGSAAEKPNRGEVVAVGTGRVLDNGEVRALAVKVGDKVVFGPYSGSNAIKVDGEELLVMGESEILAVLED

SEQ ID NO: 12006 - protein, 916 aa, Pseudomonas aeruginosa
MFAPLLKKLFGSKNERDVKRMAKAVQAINALEPQMVALSDEQLKAKTAEFQQRYAKGETLDQLLPEAFAVVREAGKRVMGMRHFDVQLIGGMTLHDGKIAEMRTGEGKTLVGTLPVYLNALSGKGVHVVTVNDYLARRDANWMRPLYEFLGLSVGVVTPFQPPEDKRAAYAADITYGTNNEFGFDYLRDNMAFSLDDKFQRELNFAVVDEVDSILIDEARTPLIISGQAEDSSELYIKINKLIPRLKRQVEEVEGKPTEEGHYSIDEKTRQVELNEQGHQFIEDLLSQNGLLGEGESLYSAHNLSLLTHVYAALRAHTLFHRNVEYIVQGDQILLIDEHTGRTMPGRRLSEGLHQAIEAKEGLPIQAESQTLASTTFQNYFRLYNKLAGMTGTADTEAFEFRQIYGLDVVVIPTHRPIARKDFNDLVYLTQEEKYAAIITDIKQCQALGRPILVGTASIESSEYVSKLLQEAGIEHKVLNAKYHEKEAEIIAQAGAPGSVTIATNMAGRGTDILLGGNWEVEVAALENPTEEQIAQIKAEWQKRHQQVIEAGGLHVIASERHESRRIDNQLRGRAGRQGDPGSSRFYLSLEDNLMRIFASDRVKNFMKALGMQSGEAIEHRMVTNAIEKAQRKVEGRNFDIRKQLLEFDDVANEQRKVIYHMRNTLLSAEDVGETIKEFREETLSATINQHIPPQSLPEQWDIEGLEAALYSDFAVRLPIQQWLDEDDKLYEETLRSKILEQIVAAYYEKEELAGAEALRAFEKQMLLRVLDDLWKDHLSTMDHLRHGIHLRGYAQKNPKQEYKRESFTLFQELLDSIKRDTIRVLSHVQVRREDPAEEEARLRREAEELAKRMQFQHAEAPSMEQAVAGEEEELPEGPAPVVPLEPVRNEQKIGRNEPCPCGSGKKYKHCHGQLD

SEQ ID NO: 12007 - protein, 394 aa, Pseudomonas aeruginosa
MFELVDNIAQTAVIKVIGVGGGGGNAVNHMAKNNVEGVEFICANTDAQALKNIAARTVLQLGPGVTKGLGAGANPEVGRQAALEDRERISEVLEGADMVFITTGMGGGTGTGAAPIIAEVAKEMGILTVAVVTRPFPFEGRKRMQIADEGIRALAESVDSLITIPNEKLLTILGKDASLLAAFAKADDVLAGAVRGISDIIKRPGMINVDFADVKTVMSEMGMAMMGTGCASGPNRAREATEAAIRNPLLEDVNLQGARGILVNITAGPDLSLGEYSDVGNIIEQFASEHATVKVGTVIDADMRDELHVTVVATGLGARLEKPVKVVDNTVQGSAAQAAAPAQREQQSVNYRDLDRPTVMRNQSHGSAATAAKLNPQDDLDYLDIPAFLRRQAD

SEQ ID NO: 12008 - protein, 480 aa, Pseudomonas aeruginosa
MVKEPNGVTRTMRRIRRIHFVGIGGAGMCGIAEVLLNLGYEVSGSDLKASAVTERLEKFGAQIFIGHQAENADGADVLVVSSAINRANPEVASALERRIPVVPRAEMLAELMRYRHGIAVAGTHGKTTTTSLIASVFAAGGLDPTFVIGGRLNAAGTNAQLGASRYLVAEADESDASFLHLQPMVAVVTNIDADHMATYGGDFNKLKKTFVEFLHNLPFYGLAVMCVDDPVVREILPQIARPTVTYGLSEDADVRAINIRQEGMRTWFTVLRPEREPLDVSVNMPGLHNVLNSLATIVIATDEGISDEAIVQGLSGFQGVGRRFQVYGELQVEGGSVMLVDDYGHHPREVAAVIKAIRGGWPERRLVMVYQPHRYTRTRDLYEDFVQVLGEANVLLLMEVYPAGEEPIPGADSRQLCHSIRQRGQLDPIYFERDADLAPLVKPLLRAGDILLCQGAGDVGGLAPQLIKNPLFAGKGGKGA

SEQ ID NO: 12009 - protein, 357 aa, Pseudomonas aeruginosa
MKGNVLIMAGGTGGHVFPALACAREFQARGYAVHWLGTPRGIENDLVPKAGLPLHLIQVSGLRGKGLKSLVKAPLELLKSLFQALRVIRQLRPVCVLGLGGYVTGPGGLAARLNGVPLVIHEQNAVAGTANRSLAPIARRVCEAFPDTFPASDKRLTTGNPVRGELFLDAHARAPLTGRRVNLLVLGGSLGAEPLNKLLPEALAQVPLEIRPAIRHQAGRQHAEITAERYRTVAVEADVAPFISDMAAAYAWADLVICRAGALTVSELTAAGLPAFLVPLPHAIDDHQTRNAEFLVRSGAGRLLPQKSTGAAELAAQLSEVLMHPETLRSMADQARSLAKPEATRTVVDACLEVARG

SEQ ID NO: 12010 - protein, 448 aa, Pseudomonas aeruginosa
MSLIASDHFRIVVGLGKSGMSLVRYLARRGLPFAVVDTRENPPELATLRAQYPQVEVRCGELDAEFLCSARELYVSPGLSLRTPALVQAAAKGVRISGDIDLFAREAKAPIVAITGSNAKSTVTTLVGEMAVAADKRVAVGGNLGTPALDLLADDIELYVLELSSFQLETCDRLNAEVATVLNVSEDHMDRYDGMADYHLAKHRIFRGARQVVVNRADALTRPLIADTVPCWSFGLNKPDFKAFGLIEEDGQKWLAFQFDKLLPVGELKIRGAHNYSNALAALALGHAVGLPFDAMLGALKAFSGLAHRCQWVRERQGVSYYDDSKATNVGAALAAIEGLGADIDGKLVLLAGGDGKGADFHDLREPVARFCRAVVLLGRDAGLIAQALGNAVPLVRVATLDEAVRQAAELAREGDAVLLSPACASLDMFKNFEERGRLFAKAVEELA

SEQ ID NO: 12011 - protein, 360 aa, Pseudomonas aeruginosa
MLLLLAEYLQQFYKGFGVFQYLTLRGILSVLTALSLSLWLGPWMIRTLQIRQIGQAVRNDGPQSHLSKKGTPTMGGALILTAIAISTLLWADLSNRYVWVVLVVTLLFGAIGWVDDYRKVIEKNSRGLPSRWKYFWQSVFGIGAAVFLYMTAETPIETTLIVPMLKSVEIQLGIFFVVLTYFVIVGSSNAVNLTDGLDGLAIMPTVMVAGALGIFCYLSGNVKFAEYLLIPNVPGAGELIVFCAALVGAGLGFLWFNTYPAQVFMGDVGALALGAALGTIAVIVRQEIVLFIMGGVFVMETLSVMIQVASFKLTGRRVFRMAPIHHHFELKGWPEPRVIVRFWIITVILVLIGLATLKLR

SEQ ID NO: 12012 - protein, 458 aa, Pseudomonas aeruginosa
MLEPLRLSQLTVALDARLIGEDAVFSAVSTDSRAIGPGQLFIALSGPRFDGHDYLAEVAAKGAVAALVEREVADAPLPQLLVRDTRAALGRLGALNRRKFTGPLAAMTGSSGKTTVKEMLASILRTQAGDAESVLATRGNLNNDLGVPLTLLQLAPQHRSAVIELGASRIGEIAYTVELTRPHVAIITNAGTAHVGEFGGPEKIVEAKGEILEGLAADGTAVLNLDDKAFDTWKARASGRPLLTFSLDRPQADFRAADLQRDARGCMGFRLQGVAGEAQVQLNLLGRHNVANALAAAAAAHALGVPLDGIVAGLQALQPVKGRAVAQLTASGLRVIDDSYNANPASMLAAIDILSGFSGRTVLVLGDMGELGSWAEQAHREVGAYAAGKVSALYAVGPLMAHAVQAFGATGRHFADQASLIGALATEQPTTTILIKGSRSAAMDKVVAALCGSSEESH

SEQ ID NO: 12013 - protein, 487 aa, Pseudomonas aeruginosa
MPMSLNQLFPQAERDLLIRELTLDSRGVRPGDLFLAVPGGRQDGRAHIADALAKGAAAVAYEAEGAGELPPSDAPLIAVKGLAAQLSAVAGRFYGEPSRGLDLIGVTGTNGKTSVSQLVAQALDLLGERCGIVGTLGTGFYGALESGRHTTPDPLAVQATLATLKQAGARAVAMEVSSHGLDQGRVAALGFDIAVFTNLSRDHLDYHGSMEAYAAAKAKLFAWPGLRCRVINLDDDFGRRLAGEEQDSELITYSLTDSSAFLYCREARFGDAGIEAALVTPHGEGLLRSPLLGRFNLSNLLAAVGALLGLGYPLGDILRTLPQLQGPVGRMQRLGGGDKPLVVVDYAHTPDALEKVLEALRPHAAARLLCLFGCGGDRDAGKRPLMAAIAERLADEVLVTDDNPRTEASAAIIADIRKGFAAADKVTFLPSRGEAIAHLIASAAVDDVVLLAGKGHEDYQEIDGVRHPFSDIEQAERALAAWEVPHA

SEQ ID NO: 12014 - protein, 313 aa, Pseudomonas aeruginosa
MNATYRHITVLLEEAVSALAPREDGCYLDGTFGRGGHSRALLEKLGAGGRLLGFDKDPQAIQTGKALAAEDGRFVIVQRSFAELGDEVRARGLEGRVDGVLLDLGVSSPQLDDPERGFSFLNDGPLDMRMNPGQGISAAEFIANATEEEIARVFKEYGEERFAKRMARAIVQRRQERPFERTADLAEVITVANPAWEKGKNPATRAFQGLRIHVNNELGDLERGLDAALESLAVGGRLVVISFHSLEDRIVKLFMRKHAKGEADNLPRDLPIRSKVFEPRLKLLGKPQYASEEELKANPRSRSAVMRVAEKLR

SEQ ID NO: 12015 - protein, 282 aa, Pseudomonas aeruginosa
MSAGTLFVVATPIGNLDDISPRALRVLREVALVAAEDTRHSIRLFQHFGIETPLAACHEHNEREEGGRFISRLQGGEDVALISDAGTPLISDPGFHLVRQAQALGIRVVPVPGSCALIAALSAAGLPSDRFIFEGFLPAKAAGRRSRLQAVQEEPRTLIFYEAPHRLLESLADMRDVFGGERRAVLARELSKTFETIRSLPLAELHDWVASDSNQQRGECVVLVAGWQAPEGEESIGAEALRVLDLLLAELPLKKAAALAAEITGVRKNLLYQQALQRQGKS

SEQ ID NO: 12016 - protein, 130 aa, Pseudomonas aeruginosa
MSATQNYGTGRRKTATARVFLRPGTGKISINNRGLDQFFGRETARMVVRQPLELTETVEKFDIFVTVVGGGVSGQAGAIRHGITRALIEYDETLRSSLRKAGYVTRDAREVERKKVGLRKARKRPQYSKR

SEQ ID NO: 12017 - protein, 448 aa, Pseudomonas aeruginosa
MTTRILTGITPTGTPHLGNYAGAIRPAILASRRSDVDSFYFLADYHALIKCDDPARIQRSRLEIAATWLAGGLDVERATFYRQSDIPEIPELTWLLTCVSAKGLLNRAHAYKAAVDRNVEAGEDPDAGVTMGLYSYPVLMAADILMFNAHKIPVGRDQVQHVEMARDIGQRFNHLFGNGREFFVLPEAVIEENVATLPGLDGRKMSKSYDNTIPLFSPSRQLKDAIARIVTDSRAPGEPKDPDSSHLFLLYSAFASAEQVAAFRQELLEGLAWGEAKQRLFQLLDNELGEARERYQALIAKPDDIEDILLAGAAKARRIATPFIAELREAVGLRSLREPLKSAESGKKKAAKAARLVSFRDDDGSFRFRLLDAAGEQLLLSRAFADGKAAGAVSKRLLAGETADLRAEGNAFGLWLDGEAVAQSPAFADAAARDAAIERTREALAPQE

SEQ ID NO: 12018 - protein, 421 aa, Pseudomonas aeruginosa
MDKLIITGGNRLDGEIRISGAKNSALPILAATLLADTPVTVCNLPHLHDITTMIELFGRMGVQPIIDEKLNVEVDASSIKTLVAPYELVKTMRASILVLGPMLARFGEAEVALPGGCAIGSRPVDLHIRGLEAMGAQIEVEGGYIKAKAPAGGLRGGHFFFDTVSVTGTENLMMAAALANGRTVLQNAAREPEVVDLANCLNAMGANVQGAGSDTIVIEGVKRLGGARYDVLPDRIETGTYLVAAAATGGRVKLKDTDPTILEAVLQKLEEAGAHISTGSNWIELDMKGNRPKAVNVRTAPYPAFPTDMQAQFISMNAVAEGTGAVIETVFENRFMHVYEMNRMGAQILVEGNTAIVTGVPKLKGAPVMATDLRASASLVIAGLVAEGDTLIDRIYHIDRGYECIEEKLQLLGAKIRRVPG

SEQ ID NO: 12019 - protein, 241 aa, Pseudomonas aeruginosa
MATLKAQHLAKSYKGRQVVRDVSMSIDSGQIVGLLGPNGAGKTTCFYMIVGLVQADQGVVRIDEQNVTHLPMHGRARAGIGYLPQEASIFRKLSVSDNIMAILETRSDLDRNGRKEALEGLLQEFHIHHIRDNLGMSLSGGERRRVEIARALASAPKFILLDEPFAGVDPISVGDIKQIIHHLKAKGIGILITDHNVRETLDICETAYIVNDGQLIAEGDAESILANDLVKEVYLGHEFRL

SEQ ID NO: 12020 - protein, 286 aa, Pseudomonas aeruginosa
MRLIIVSGRSGSGKSTALNVLEDNGFYCIDNLPASLLPDLAQRALLHTELLQPQVAVSIDARNLPSQLQRFPELLQEVRDNHINCDVLYLDADDETLLKRFSETRRRHPLTTDTRSLAEAIGDESQLLGPIADLADLKLDTTSLNLYQLRDTIKLRLLNKPEPGTAFLVESFGFKRGMPVDADLVFDVRCLPNPYWKPELRDHSGLEPEVREYLAAQPDVEEMYQDIVGYLNKWLPRFAASNRSYVTVAIGCTGGHHRSVYLAERIGAALRDSLKNVQIRHRDLSS

SEQ ID NO: 12021 - protein, 96 aa, Pseudomonas aeruginosa
MALERSDVEKIAHLARLGLSEADLPRTTETLNNILGLIDQMQAVDTSGVEPLAHPLEATQRLRPDAVTETDHRDAYQTIAPAVEEGLYLVPKVIES

SEQ ID NO: 12022 - protein, 484 aa, Pseudomonas aeruginosa
MLHQLTLAEIARALADKQFSAEELTRTLLGRIRQLDPQLNSFISITDDLAIAQAKAADERRANGENGALLGAPIAHKDLFCTQGVRTSCGSKMLDNFVSPYDATVVEKLTAAGAVTLGKLNMDEFAMGSSNQSSHYGAVKNPWSLDRVPGGSSGGSAAAVAARLLPAATGTDTGGSIRQPAALTNLTGIKPTYGRVSRWGMIAYASSLDQGGPLARTAEDCALMLGVMAGFDPKDSTSVEQPVDDYLAALQKPLSGLRIGLPREYFGAGLDSRIADAVLAVVEELKTLGATVKDISLPNMQHAIPAYYVIAPAEASSNLSRFDGVRYGYRCDAPQNLEDLYKRSRAEGFGSEVKNRIMVGTYALSAGYYDAYYLQAQKIRRLIKNDFVSAFAEVDVILGPTTPNPAWKIGEKNDDPVSQYLEDIYTITANLAGLPGLSMPAGFVDGLPVGVQLLAPYFQEGRLLNVAHQYQQVSDWHTRTPAGF

SEQ ID NO: 12023 - protein, 481 aa, Pseudomonas aeruginosa
MQWETVIGLEIHAQLATQSKIFSGSSTAFGAAPNTQASLVDLAMPGTLPVLNEEAVRMACLFGLAIDARIDRQNVFARKNYFYPDLPKGYQTSQMDHPIVGKGHLDITLEDGTTKRIGITRAHLEEDAGKSLHEDFQGMSGIDLNRAGTPLLEIVSEPDIRSAKEAVAYVKAIHALVRYLGICDGNMAEGSLRCDCNVSVRPKGQAEFGTRAEIKNVNSFRFIEKAINHEIQRQIELIEDGGKVVQETRLYDPNKDETRSMRGKEEANDYRYFPCPDLLPVVIEPEYLAKLREQLPELPVQKRERFESQYGLSAYDASVLSASREMADYFEKVQGICGDAKLAANWVMVELGSLLNKDGLEIEQSPVSAEQLGGMILRIKDNTISGKLAKMVFEAMANGEGSADQIIEAKGLKQVTDSGAIEKMLDEVLAANAEQVEQYRAADEAKRGKMFGFFVGQAMKASKGKANPQQVNELLKKKLEA

SEQ ID NO: 12024 - protein, 537 aa, Pseudomonas aeruginosa
MRRNAVIRSAIIPSLLGAALVAAVPQAFASNLIFCSEGSPAGFDPAQYTTGTDFDAAAETVFNRLTQFERGGTKVLPGLAESWDVSDDGKTYTFHLRKGVKFHSTDYFKPTREFNADDVLFTFERMLDKDHPFRKAYPTEFPYFTDMGLDKNIARVEKLDEHTVKFTLNEVDAAFIQNLAMPFPSIQSAEYAAQLLKQGKASDINQKPIGTGPFVFSRYQKDAQIRFKGNKDYWKPDEVKVDNLIFAINTDASVRAQKLKAGECQITLNPRPADLDALKKDPNLNLPSQAGFNLGYIAYNVTHKPFDKLEVRQALDMAVNKKAIIDAVYQGAGQLASNGMPPTQWSYDETIKDAPYDPAKARELLKKAGVAEGTEITLWAMPVQRPYNPNAKLMAEMLQNDWAKIGIKAKIVTYEWGEYIKRAKGGEHDAMLIGWSGDNGDPDNWLGTLYGCDAVDGNNFSKWCDAGYDKLVKDAKRTTDQGKRTELYKQAQHILKEQVPITPIAHSTVYQPMRKTVHDFRISPFGLNSFYEVSVGK

SEQ ID NO: 12025 - protein, 435 aa, Pseudomonas aeruginosa
MSHRIVIVGGGAGGLELATRLGRTLGKRGKAQVTLVDANLTHIWKPLLHEVAAGSLNSSEDELNYVAQAKWNHFEFQLGRMQGLDRAGKRVRLAALVDENGVELVPERDIAYDTLVIAVGSTTNDFGTEGAAEHCIFLDTRAQAERFHRQLLGQYLRAHTGHDANNNAVSIAIIGAGATGVELAAELHHAAQMLAAYGLDRIRPEDLHISLVEAGPRVLPALPERISQPVHQTLSKLGVRVMTGSAVSKVDADGLWTGDGEFVPATLKVWAAGIRAPAFLKELDGLESNRINQLVVRPTLQTTRDDDIFAFGDCAACPQPAQPGEQPRNVPPRAQAAHQQASLLVKSLRARLEGKPLGEYHYRDYGSLISLSRFSAVGNLMGNLMGSVMLEGWLARMFYVSLYRMHQMALYGPLRTAMLMLSGRLRSTEPRLKLH

SEQ ID NO: 12026 - protein, 320 aa, Pseudomonas aeruginosa
MSDMIQRAAEVPFELGGQRLDQIAAQLFPEHSRSRLAGWIKDGRLTVDGAVLRPRDIVHSGAQLVLEAEQEAQGEWLAQDIELEIVYEDEHILVIDKPAGLVVHPAAGHQDGTLLNALLYHVPDIANVPRAGIVHRLDKDTTGLMVVAKTLEAHTKLVAQLQARSVSRIYEAIVIGVITSGGTIDAPIGRHGVQRQKMAVVDAGKVAVSHYRVLERFRAHTHTRVKLETGRTHQIRVHMSHIGYPLVGDPVYGGRFRIPPVASQTLVQTLREFPRQALHARFLELDHPATGVRMKWESPLPEDFLWLLSLLRQDREAFVG

SEQ ID NO: 12027 - protein, 943 aa, Pseudomonas aeruginosa
MTDYKATLNLPETAFPMKAGLPQREPETLKFWNDIGLYQKLRAIGGDRPKFVLHDGPPYANGSIHIGHAVNKILKDIIVRSKTLAGYDAPYVPGWDCHGLPIEHKVETTHGKNLPADKTRELCREYAAEQIEGQKADFIRLGVLGEWDNPYKTMNFANEANEIRALAEMVKQDFVFKGLKPVNWCFDCGSALAEAEVEYADKKSPTIDVGFPVADADKLAAAFGLAALDKPAQIVIWTTTPWTIPANQALNVHPEIDYALVDAGDRYLVLAEALVESCLARYQREGKVVATAKGEALELINFRHPFYERLSPVYLADYVALDAGTGIVHSSPAYGEDDFYTCKRYGMSNDDILSPVQSNGVYVDSLPFFGGQFIWKANPNVVAKLEEVGSLLAHETINHSYMHCWRHKTPLIYRATAQWFVGMDKQPRQGASLRERALEAITQTEFVPGWGQARLHGMIAGRPDWCISRQRNWGVPIPFFLHKASGELHPRTVELMEEVAQRVEKEGIEAWFKLDAAELLGEEAAQYEKINDTLDVWFDSGTTHWHVLRGSHRIGHASGPVADLYLEGSDQHRGWFHSSLLTGCAIDNHAPYRQLLTHGFTVDESGRKMSKSLGNTVVPQTVIDTLGADILRLWVASTDYSGEIAVSQQILQRSADAYRRIRNTTRFLLSNLNGFDPATDLLPPQEMLALDRWAVDRALLLQREIEEAYREYRFWNVYSKVHNFCVQELGGFYLDIIKDRQYTTGANSVARRSCQTALFHIAEALVRWIAPILAFTAEEVWKFLPGERAESVMLATWYDGLNELPADVTLNRQYWEQVMAVKAAVNKELENQRAAKAVGGNLQAEVTLYAEDALQAQLAKLGNELRFVLITSTATLAPLSAAPADAVDSEVAGLKLKVVKSTHAKCGRCWHHREDVGQHAAHPDLCGRCIENIEGSGEVRHYA

SEQ ID NO: 12028 - protein, 406 aa, Pseudomonas aeruginosa
MKFVDEVSIHVKAGDGGNGLMSFRREKFIEKGGPNGGDGGDGGSIYLEADVNLNTLVDYRYTRRFDAQRGENGGSKDCTGAKGDDLILPVPVGTTVIDANTQEIIGDLTEPGQRLMVAQGGWHGLGNTRFKSSTNRAPRQTTPGKPGEARDLKLELKVLADVGLLGLPNAGKSTFIRAVSAAKPKVADYPFTTLVPNLGVVSVGRYKSFVVADIPGLIEGAAEGAGLGIRFLKHLARTRILLHLVDMAPLDESDPADAAEVIVRELGRFSPALTERERWLVLNKMDQILDPAEREARKQAVIERLGWEGPVYVISALERDGTEALSQDIMRYLDERTLRLEEDPQYAEELAELDRRIEDEARARLQALDDARALRRSGLKNAGAVDDDDFDDEEDDGDGPEIFYVP

SEQ ID NO: 12029 - protein, 85 aa, Pseudomonas aeruginosa
MAHKKAGGSTRNGRDSESKRLGVKLFGGQAVKAGNILVRQRGTKFHAGYGVGLGKDHTLFAKVDGVVKFETKGAFGRKYVSIVAA

SEQ ID NO: 12030 - protein, 103 aa, Pseudomonas aeruginosa
MYAVIVTGGKQHKVTEGEFLKVEKLDVATGEAIDFDRVLLVANGEDVKIGLPVVEGAKVTAEVVSHGRHDKVRIIKFRRRKHHMKRQGHRQWFTEIKITGIQA

SEQ ID NO: 12031 - protein, 322 aa, Pseudomonas aeruginosa
MQPQAFYRVVAEDFTAVDGIIRRQLTSRVPLVEKIGDYIISAGGKRLRPLLVLLAGKTLGYKGDDLCLLAATIEFLHTSTLLHDDVVDASGLRRGRSTANALWGNAPSVLVGDFLYARSFEMMVELGSMPVMRIISQATRVIAEGEVLQLSKVRDASTTEETYMEVIRGKTAMLFEASTHSAAALCQAGEEQSEALRRFGDYLGIAFQLVDDLLDYRGDAATLGKNVGDDLAEGKPTLPLIVTMRDGTEEQAALVRKAIQQGGSQDLESVCAAVEAAGALDYTANLARDYAARAIACLDTLPDNEYRSALVELSEFAVARTH

SEQ ID NO: 12032 - protein, 228 aa, Pseudomonas aeruginosa
MISLQGIGKGYLLGGQPLQILKDVCLDIFPGESCAIVGASGSGKSTLLNILGLLDRPDSGAYRFAEHDIFSVDGDRLAAIRNRLIGFVFQSFNLLPRLNALDNVALPLSYRGMPRREALERAEAMLARVGLAERAGHRPADLSGGQRQRVAIARALVGEPALILADEPTGNLDASTAKEVLELLLTLNRERQVTLVVVTHDPGLAARLGRQLTVRHGEVHEDLAEACR

SEQ ID NO: 12033 - protein, 554 aa, Pseudomonas aeruginosa
MAQYVYTMHRVGKIVPPKREILKDISLSFFPGAKIGVLGLNGAGKSTLLRIMAGVDTEIEGEARPMPGINVGYLPQEPKLDPQATVRDIVEEAVGQIKQAQARLDEVYAAYAEPDADFDALAAEQAKLEAILQASDGHNLERQLEVAADALRLPPWDAKVEHLSGGEKRRVALCRLLLSAPDMLLLDEPTNHLDADSVAWLEHFLHDFPGTVVAITHDRYFLDNVAGWILELDRGHGIPFEGNYSGWLESKAARLAQEAKQEASHAKAMKAELEWVRQGAKGRQAKSKARLQRFEELQSQEFQKRSETNEIYIPAGPRLGDKVIELHNVTKGYGDRVLIDNLSLSIPKGAIVGVIGGNGAGKSTLFRMLTGKEQPDSGTIEIGETVQIASVDQSRDSLEGNKTVWEQVSDGFEQIKIGNYEVPSRSYVGRFNFKGADQQKFVKDLSGGERGRLHLALTLKQGGNVLLLDEPSNDLDVETLRALEEALLDFPGAAIVISHDRWFLDRIATHILSYEDDGKVTFFEGNYTEFEADRKKRLGDAASQPHRVRYKKLA

SEQ ID NO: 12034 - protein, 417 aa, Pseudomonas aeruginosa
MFSRDLTLARYDAELFAAMEQEAQRQEEHIELIASENYTSPAVMEAQGSVLTNKYAEGYPHKRYYGGCEYVDIVEQLAIDRAKQLFGADYANVQPHAGSQANAAVYLALLSAGDTILGMSLAHGGHLTHGASVSSSGKLYNAVQYGIDANGLIDYDEVERLAVEHKPKMIVAGFSAYSQVLDFARFRAIADKVGAYLFVDMAHVAGLVAAGVYPNPVPFADVVTTTTHKTLRGPRGGLILARANEEIEKKLNSAVFPSAQGGPLEHVIAAKAVCFKEALQPEFKTYQQQVLKNAQSMAQVFLDRGFDVVSGGTQNHLFLLSLIKQDITGKDADAALGRAFITVNKNSVPNDPRSPFVTSGLRIGTPAVTTRGFKEAECRELAGWICDILENMGDESVVDGVREKVKAICAKFPVYGN

SEQ ID NO: 12035 - protein, 453 aa, Pseudomonas aeruginosa
MAKAKRMYGCTECGATFPKWAGQCADCGAWNTLVETVVEAAPSGSGRGGWAGQQANLKTLAEVSVEEMPRFTTGSTELDRVLGGGLVDGSVVLIGGDPGIGKSTILLQTLCNLASRVPALYVTGEESQQQVAMRARRLSLPEDKLKVMTETSIETIIATARQEQPRVMVIDSIQTIFTEQLQSAPGGVAQVRESAAMLVRYAKQSGTAIFLVGHVTKEGALAGPRVLEHMVDTVLYFEGESDGRLRLLRAVKNRFGAVNELGVFGMTDKGLKEVSNPSAIFLTRAQEAVPGSVVMATWEGSRPMLVEVQALVDTSHLANPRRVTLGLDQNRLAMLLAVLHRHGGIPTYDQDVFLNVVGGVKVLETASDLALMAAVMSSLRNRPLPHDLLVFGEVGLSGEVRPVPSGQERLKEAGKHGFKRAIVPLGNAPKEAPAGLQVIAVTRLEQALDALFE

SEQ ID NO: 12036 - protein, 487 aa, Pseudomonas aeruginosa
MTDLNTSQGQQLRRVLKPRHLNMIAIGGSIGTGLFVASGATVATAGPGGALLSYALIGLMVYFLMTSLGEMAAYMPVSGSFCTYGSRFVEDGFGFALGWNYWYNWAVTIAAELVAAQLVMSFWFPEVPGIYWSAIFLGIMFGLNVISARGFGESEFWFALIKVVTVVIFIGVGLATIFGIMHGVESPGFSNFTMGDAPFVGGFQAMVGVAMIAGFSFQGTELIGIAAGESENPRKNIPIAIRQVFWRILMFYILAIFVIGMLIPYTDPNLLKNDASDISVSPFTLLFERAGFAAAAGVMNAVILSAILSAGNSGMYASTRMLYNLALEGKAPRLFSRVSRSGVPRNALYATTLVGALCFLTSAFGDSTVYTWLLNTSGMCGFIAWLGIAISHYRFRKGYLAQGGRLEDLPYRAKLFPFGPLFAFALCMVITLGQNYQALVGERIDWIGLLATYISLPLFLAIWLGYRWKKRARFVRYHEMDVSPTNT

SEQ ID NO: 12037 - protein, 212 aa, Pseudomonas aeruginosa
MPVHEIRHPLIRHKLGLMRRADISTKNFRELAQEVGALLTYEATKDLPLEQYEIPGWAGPVTVEKISGKKITVVPILRAGIGMLDGVLSLIPGAKVSAVGVARNEETLEARTYLEKLAPDIAERRSLIIDPMLATGGSMVATIDLLKKAGSKEIRAMVLVAAPEGIEAVRKAHPDVIIYTASIDEKLDENGYIIPGLGDAGDKIFGTKQKEA

SEQ ID NO: 12038 - protein, 305 aa, Pseudomonas aeruginosa
MHILLTGGTGLMGRRLCARWRQAGHRLTVFSRRPQQVESLCGVGVRGIDRFDEYGDQPLDAVVNLAGEPIADKPWSHKRKALLWESRVRLTERLVEWLDAREQRPDLLLSGSAVGWYGDSGERPVTEEGAAAGEDFASELCLAWEQIAREAEKLGTRVVLLRTGLVLAPEGGFLGRLLPLYRLGLGGPLGDGRQWMPWIHIEDQIELIDFLLRRPDASGPYNACAPNPVRNRDFAKALGRALHKPARIPTPGFVLRLGLGEMSGLLLGGQRALPQRLQDAGYRFQFTDLDVALADVLDARRKDQA

SEQ ID NO: 12039 - protein, 265 aa, Pseudomonas aeruginosa
MAVESAAVGVFDSGVGGLSVLREIRARLPSESLLYVADNAHVPYGEKSAEYIRERCERIGDFLLEQGAKALVLACNTATAAAAAELRERYPQVPLVAMEPAVKPAAAATRNGRVGVLATTGTLKSARFAALLDRFASDVQVFTQPCPGLVERIEAGDLYGPQTRALLERLLAPILEQGCDTLILGCTHYPFVKPLLAELIPAEMAVIDTGAAVARQLERVLSARALLASGQAATPRFWTSALPEEMERILPILWGSPESVGKLVV

SEQ ID NO: 12040 - protein, 313 aa, Pseudomonas aeruginosa
MSKMMVFTGNANPDLARRVVRQLHIPLGDVSVGKFSDGEISVEINENVRGKDVFLIQPTCAPTNDNLMELVVMADAFRRSSATRITAVIPYFGYARQDRRPRSARVAISAKVVADMLTVVGVNRVLTVDLHADQIQGFFDIPVDNIYGSPVLVDDIEDQRFENLMIVSPDIGGVVRARAVAKSLGVDLAIIDKRRPKANQSEVMHIIGDVEGRTCVLVDDMVDTAGTLGHAAKALKEHGAAKVIAYCTHPVLSGRAIENIEKSVLDELVVTNTIPLSAAAQACGRIRQLDIAPVVAEAMRRISNEESISAMFR

SEQ ID NO: 12041 - protein, 366 aa, Pseudomonas aeruginosa
MGFNCGIVGLPNVGKSTLFNALTKSGIAAENFPFCTIEPNSGIVPMPDARLNALAEIVKPERVLPTTMEFVDIAGLVAGASKGEGLGNKFLANIRETDAIAHVVRCFEDDNVIHVSNSVDPKRDIEIIDLELIFADLDSCEKQLQKVARNAKGGDKEALAQKALLEKLIPHFTEGKPARSLLKNLGDEEKRLVRSFHLLTSKPVMYIANVAEDGFENNPHLDVVKAIAEEEGAVVVPVCNKIEAEIAELEDGEEKDMFLESLGLEEPGLNRVIRAGYGLLNLQTYFTAGVKEVRAWTVRVGATAPQAAGVIHTDFEKGFIRAEVVAYDDFIQFKGEQGAKEAGKWRLEGKDYIVKDGDVMHFRFNV

SEQ ID NO: 12042 - protein, 150 aa, Pseudomonas aeruginosa
MSDAISFRPMTEADLDAVLKIEYAAFSHPWTRGIFSEGLKNYHCWLMFEGSQQVGHGVIQIILDEAHLLNITVKPESQGRGLGLRLLEHLMREAAGHQARECFLEVRASNQAAYRLYERYGFNEIGRRRDYYPAVGGREDALVMACTLFD

SEQ ID NO: 12043 - protein, 338 aa, Pseudomonas aeruginosa
MRVFYDKDCDLSIIQGKKVAIIGYGSQGHAHACNLKDSGVDVTVGLRSGSATVAKAEAHGLKVADVKTAVAAADVVMILTPDEFQGRLYKEEIEPNLKKGATLAFAHGFSIHYNQVVPRADLDVIMIAPKAPGHTVRSEFVKGGGIPDLIAIYQDASGNAKNVALSYACGVGGGRTGIIETTFKDETETDLFGEQAVLCGGCVELVKAGFETLVEAGYAPEMAYFECLHELKLIVDLMYEGGIANMNYSISNNAEYGEYVTGPEVINAESRAAMRNALKRIQDGEYAKMFITEGAANYPSMTAYRRNNAAHPIEQIGEKLRAMMPWIAANKIVDKSKN

SEQ ID NO: 12044 - protein, 163 aa, Pseudomonas aeruginosa
MRHIISLLLENEPGALSRVVGLFSQRNYNIESLTVAPTEDPTLSRLTLTTVGHDEVIEQITKNLNKLIEVVKLVDLSESAHIERELMLVKVKATGAQRAEVKRTTDIFRGQIVDVTSSVYTVQLAGTSDKLDSFIQAIGTASILEVVRSGVTGIARGDKTLSI

SEQ ID NO: 12045 - protein, 574 aa, Pseudomonas aeruginosa
MELLSGAEMVVRSLRDEGVKYIYGYPGGALLHIYDALFKEHDVTHILVRHEQAATHMADGYARATGKPGVVLVTSGPGATNAITGIATAYMDSIPMVILSGQVPSNMVGTDAFQETDMVGISRPIVKHSFIIKHPSEIPEVIKKAFYLAQSGRPGPVVVDIPKDMGDPTQKFEYSYPKKVKLRSYSPAVRGHSGQIRKAAEMLLAAKRPVVYSGGGVIMGNAAAPLTELAQMLNLPVTNTLMGLGGYPGADRQFLGMLGMHGSFTANLAMHHSDVILAVGARFDDRVINGAAKFCPNAKIIHIDIDPASISKTIKADIPIVGPVDSVLTEMVAIVREIGETPNQDAQAAWWKQIDEWRGNRGLFPYDKGDGSIIKPQTVIETLYEVTHGDAFITSDVGQHQMFASQYYKFNKPNRWINSGGLGTMGFGFPAAMGIKLNFPDDDVACVTGEGSIQMNIQELSTCLQYDLPVKIVNLNNGALGMVRQWQDMQYNSRYSHSYMESLPDFVKLAEAYGHVGMRITDLKDLKPKMEEAFAMKNRLVFLDIQVDASEHVYPMQIRDGAMRDMWLSKTERT

SEQ ID NO: 12046 - protein, 774 aa, Pseudomonas aeruginosa
MTRPRSPRSRNSKARPAPGLNKWLSWALKLGLVGLVLLAGFAIYLDAVVQEKFSGRRWTIPAKVYARPLELFNGLKLSREDFLRELDALGYRREPSVSGPGTVSVAASAVELNTRGFQFYEGAEPAQRVRVRFNGNYVSGLSQANGKELAVARLEPLLIGGLYPAHHEDRILVKLDQVPTYLIDTLVAVEDRDFWNHHGVSLKSVARAVWVNTTAGQLRQGGSTLTQQLVKNFFLSNERSLSRKINEAMMAVLLELHYDKRDILESYLNEVFLGQDGQRAIHGFGLASQYFFSQPLAELKLDQVALLVGMVKGPSYFNPRRYPDRALARRNLVLDVLAEQGVATQQEVDAAKLRPLGVTRQGSMADSSYPAFLDLVKRQLRQDYRDEDLTEEGLRIFTSFDPILQEKAETSVNETLKRLSGRKGVDQVEAAMVVTNPETGEIQALIGSRDPRFAGFNRALDAVRPIGSLIKPAVYLTALERPSKYTLTTWVQDEPFAVKGQDGQVWRPQNYDRRSHGTIFLYQGLANSYNLSTAKLGLDVGVPNVLQTVARLGINRDWPAYPSMLLGAGSLSPMEVATMYQTIASGGFNTPLRGIRSVLTADGQPLKRYPFQVEQRFDSGAVYLVQNAMQRVMREGTGRSVYSQLPSSLTLAGKTGTSNDSRDSWFSGFGGDLQAVVWLGRDDNGKTPLTGATGALQVWASFMRKAHPQSLEMPMPENVVMAWVDAQTGQGSAADCPNAVQMPYIRGSEPAQGPGCGSQNPAGEVMDWVRGWLN

SEQ ID NO: 12047 - protein, 266 aa, Pseudomonas aeruginosa
MPDVTLTTLQGLKQSGEKIAMLTCYDATFAHTASQAGVDVLLVGDSLGMVLQGHDSTLPVSNEEMAYHTACVKRGNKGSLIVTDLAFESSHSVAQTLADAVRLMQAGAHMVKLEGGVWLAEPIARLAQMGVPVCAHLGLTPQAVNLFGGFKVQGRQETQARQLRADAIALEQAGAAMLLLECVPSVLAEEITQAVKIPVIGIGAGAATDGQVLVMHDMLGLSLTGRSPKFVKDFMQGQESIPAAIAAYVRAVKDVSFPAAEHGFNA

SEQ ID NO: 12048 - protein, 645 aa, Pseudomonas aeruginosa [sequence omitted]

SEQ ID NO: 12049 - protein, 65 aa, Pseudomonas aeruginosa
MNSDVIKGKWKQLTGKIKERWGDLTDDDLQAADGHAEYLVGKLQERYGWSKERAEQEVRDFSDRL

SEQ ID NO: 12050 - protein, 701 aa, Pseudomonas aeruginosa
MNPVTKQFQFGQSTVTLETGRIARQATGAVLVTMDDVSVLVTVVGAKSPAEGRDFFPLSVHYQEKTYAAGRIPGGFFKREGRPSEKETLTSRLIDRPIRPLFPEGFMNEVQVVCTVVSTNKKSDPDIAAMIGTSAALAISGIPFAGPIGAARVGFHPEIGYILNPTYEQLQSSSLDMVVAGTEDAVLMVESEADELTEDQMLGAVLFAHDEFQAVIRAVKELAAEAGKPAWDWKAPAENTVLVNAIKAELGEAISQAYTITIKQDRYNRLGELRDQAVALFAGEEEGKFPASEVKDVFGLLEYRTVRENIVNGKPRIDGRDTRTVRPLRIEVGVLGKTHGSALFTRGETQALVVATLGTARDAQLLDTLEGERKDAFMLHYNFPPFSVGECGRMGSPGRREIGHGRLARRGVAAMLPTQDEFPYTIRVVSEITESNGSSSMASVCGASLALMDAGVPVKAPVAGIAMGLVKEGEKFAVLTDILGDEDHLGDMDFKVAGTDKGVTALQMDIKINGITEEIMEIALGQALEARLNILGQMNQVIAKPRAELSENAPTMLQMKIDSDKIRDVIGKGGATIRGICEETKASIDIEDDGSVKIYGETKEAAEAAKLRVLAITAEAEIGKIYVGKVERIVDFGAFVNILPGKDGLVHISQISDKRIDKVTDVLQEGQEVKVLVLDVDNRGRIKLSIKDVAAAEASGV

SEQ ID NO: 12051 - protein, 89 aa, Pseudomonas aeruginosa
MALSVEEKAQIVNEYKQAEGDTGSPEVQVALLSANINKLQDHFKANGKDHHSRRGLIRMVNQRRKLLDYLKGKDVSRYTALIGRLGLRR

SEQ ID NO: 12052 - protein, 493 aa, Pseudomonas aeruginosa
MSKEVLLVVESVSNEKGVPAGVIFEALELALATATKKRFEDEVDLRVEINRHNGSYETFRRWHVVADEDYQDPATEITVEDVQEQKPGAKVGEVIEEKIESIEFGRIAAQTAKQVIVQKVREAERAQVVDAYREKVGEIISGTVKKVTRDNVIVDLGNNAEALLARDQIIPRETFRVGTRVRALLKEIRTENRGPQLVLSRTAPEMLIELFRIEVPEIAEQLIDVMAAARDPGSRAKIAVRSKDKRIDPQGACIGMRGSRVQAVSGEIGGERVDIVLWDDNPAQFVINAMAPAEVAAIIVDEDTHTMDIAVAEDNLAQAIGRSGQNVRLASQLTGWTLNVMTEADIQAKQQAETGDILQRFVDELDVDEELAQVLVEEGFTTLEEIAYVPMEEMLSIDGFDEDIVNELRSRAKDRLLTKAIATEEKLADAQPAEDLLSLDGMSKELALDLALRGVTTREDLAEQSIDDLLDIDGMDEERAGKLIMAARAHWFE

SEQ ID NO: 12053 - protein, 251 aa, Pseudomonas aeruginosa
MRRPLVAGNWKMHGTHSSVAELIKGLRQLALPSGVDVAVMPPCLFISQVIQGLAGKAIDVGAQNSAVEPMQGALTGETAPSQLADVGCSMVLVGHSERRLILGESDEVVSRKFAAAQSCGLVPVLCVGETRAEREAGKTLEVVARQLGSVIDELGVGAFARAVVAYEPVWAIGTGLTASPAQAQEVHAAIRAQLAAENAEVAKGVRLLYGGSVKAASAAELFGMPDIDGGLVGGASLNADEFGAICRAAGS

SEQ ID NO: 12054 - protein, 445 aa, Pseudomonas aeruginosa
MSRKYFGTDGIRGRVGEFPITPDFVLKLGWAVGMAFRRQGNCRVLIGKDTRSSGYMFESAFEAGLSASGADTLLLGPMPTPGIAYLTRTFHAEAGVVISASHNPHDDNGIKFFSGQGTKLPDDVELMIEELLDAPMTVVESARLGKVSRINDAAGRYIEFCKSSVPTSTDFNGLKVVLDCANGATYKIAPSVFRELGAEVTVLAASPNGLNINDKCGSTHLDGLQAAVVEHHADLGIAFDGDGDRVMMVDHTGAVVDGDELLFLIARDLQESGRLQGGVVGTLMSNLGLELALQELHIPFVRAKVGDRYVMAELLARNWMLGGENSGHIVCCQNTTTGDAIIAALQVLMALKHRGQTLAEARQGIRKCPQVLINVRFKGENDPLEHPSVKEASVRVTEQMGGRGRVLLRKSGTEPLVRVMVEGDEEASVRAHAEQLAKIVSEVCA

SEQ ID NO: 12055 - protein, 283 aa, Pseudomonas aeruginosa
MSNPQYPTRLPCGSRVLDLARPHVMGILNVTPDSFSDGGRYDRLDDALRHAERMVLEGATLIDVGGESTRPGARSVSPTEELERVAPVVERIARELDVVISVDTSTPAVMRETARLGAGLINDVRSLQRDGALDAAVDSGLAVCLMHMRGEPQTMQDAPAYQDVVAEVGAFLQERVDACVAAGIDRERLLLDPGFGFAKTLEHNLVLFRHLQALHGLGLPLLVGVSRKSMIGKVLGREVDERLYGSLALAALALAKGARIIRVHDVAATVDVMRMISAVEMAD

SEQ ID NO: 12056 - protein, 639 aa, Pseudomonas aeruginosa
MAKNLILWLIIAAVLVTVMNNFSSPSEPQTLNYSDFIQQVKDGKVERVTVDGYVITGKRSDGDTFKTIRPAIQDNGLIGDLVNNNVVVEGKQPEQQSIWTQLLVASFPILVIIAVFMFFMRQMQGGGGGRGGPMSFGKSKARLLSEDQVKTTFADVAGCDEAKEEVSELVEFLRDPGKFQRLGGRIPRGVLMVGPPGTGKTLLAKAIAGEAKVPFFTISGSDFVEMFVGVGASRVRDMFDQAKKHAPCIIFIDEIDAVGRHRGAGLGGGHDEREQTLNQLLVEMDGFEMNDGIIVIAATNRPDVLDPALLRPGRFDRQVVVGLPDIRGREQILKVHMRKVPLGDHVDPAVIARGTPGFSGADLANLVNEASLFAARSNKRIVDMREFELAKDKIMMGAERKTMVMSEKEKRNTAYHEAGHAIVGRLVPEHDPVYKVSIIPRGRALGVTMFLPEEDRYSLSKRALESQICSLFGGRIAEEMTLGFEGVTTGASNDIMRATQLARNMVTKWGLSEKLGPLMYAEEEGEVFLGRSAGSQHANVSGETAKMIDQEVRRIIDDCYGTAKRLLDENRDKLEMMADALMKYETIDSDQIDDIMAGRVPREPRDWQGGSGTGTPPANLEESGRRENTPPIGGPAGEH

SEQ ID NO: 12057 - protein, 268 aa, Pseudomonas aeruginosa
MRRIAVVGAAGRMGKNLIEAVQQTGGAAGLTAAVDRPDSTLVGADAGELAGLGRIGVPLSGDLGKVCEEFDVLIDFTHPSVTLKNIEQCRKARRAMVIGTTGFSADEKLLLAEAAKDIPIVFAANFSVGVNLCLKLLDTAARVLGDEVDIEIIEAHHRHKVDAPSGTALRMGEVVAQALGRDLQEVAVYGREGQTGARARETIGFATVRAGDVVGDHTVLFAAEGERVEITHKASSRMTFARGAVRAALWLEGKENGLYDMQDVLGLR

SEQ ID NO: 12058 - protein, 637 aa, Pseudomonas aeruginosa
MGKIIGIDLGTTNSCVAILENGNVKVIENAEGARTTPSIIAYTNDGETLVGQPAKRQAVTNPQNTLYAVKRLIGRRFEENVVQKDIQMVPYSIVKADNGDAWVEVKGQKMAPPQISAEVLKKMKKTAEDYLGEPVTEAVITVPAYFNDSQRQATKDAGRIAGLDVKRIINEPTAAALAYGLDKAKGDHTVIVYDLGGGTFDVSVIEIAEVDGEHQFEVLATNGDTFLGGEDFDIRLIDYLVDEFKKESGINLKGDPLAMQRLKEAAEKAKIELSSTQQTDVNLPYVTADASGPKHLNVKVSRAKLESLVEDLVQRTIEPCRTALKDAGLDVSDIHEVILVGGQTRMPLVQKTVAEFFGKEARKDVNPDEAVAVGAAIQGAVLAGDVKDVLLLDVTPLTLGIETLGGVMTGLIEKNTTIPTKKSQVFSTADDNQGAVTIHVLQGERKQAAQNKSLGKFDLADIPPAPRGVPQIEVTFDIDANGILHVSAKDKATGKQQSIVIKASSGLSEDEIQQMVRDAEANAEEDRKFEELAAARNQGDALVHATRKMITEAGDKATAEDKATIEKALGELEAAVKGDDKAEIEAKMNALSQASTPLAQKMYAEQAQQGEDAPQGEQAKAADDVVDAEFEEVKDNK

SEQ ID NO: 12059 - protein, 433 aa, Pseudomonas aeruginosa
MNAADESLGNVLLVGLGAVAIQVALDLRRHGAGRLGALNHPGRRSQRIAEALARGACLQLEGQGQHRWLSGNAALDVFHQDPAELRDDWQTLVLCVPADSYLDVVRGLPWERLGGVRTLLLVSAFIGANLLVRSALPAGCQATVLSLSSYYAATKVIDETQPLRALTKAVKRRVYLGSSRPDCPARETWRRVLAGSGVEVVPLATPEAAEGRNVTTYVHSPFFLGEFALARILSEQGPPGFMYKLYPEGPITPGAIGAMRRLWCELSELLRRMGAEPLNLLRFLNDDNYPVHETMLPRASIDGFAEAGAERQEYLLFVRYAALLVDPFSPADEQGRHFDFSAVPFRRVSRDEDGLWRLPRVPLEDYRKLALIVALAAHFDLAMPQARSLLASYENAVSRFIDCQGASQCHPSLYPIDSRPAADAIYRQWCSTC

SEQ ID NO: 12060 - protein, 263 aa, Pseudomonas aeruginosa
MQGRTPLLETLRELECEIRLLTVYARECCGCYEILRRKLDRLSGLIGEDCSRAQWQADSDDPALQALGLRLRDAAVQALCELEKHLCQGVLHEPGEMGRYLGSLLESIRGELDSAGIDADARVLFVGSGALPTSALVLAREVGAHLCCLDIDEEALGCAREIARCQGLEARMQFSSLPPAELAFSRDATHFLIASLVQQKSAVLAQIRQVMRADAKVLLRHGSGIKGLFNYPVEPAELDGWRVCAERVSQPLYDTLILEKAGR

SEQ ID NO: 12061 - protein, 636 aa, Pseudomonas aeruginosa
MAARRTRKDDGSNWTVADSRGVYGIRHWGAGYFAINDGGNVEVRPQGADSTPIDLYELVGQLREAGLSLPLLVRFPDILQDRVRKLTGAFDANIERLEYQSRYTALYPIKVNQQEAVVENIIATENVSIGLEAGSKPELMAVLALAPKGGTIVCNGYKDREFIKLALMGQKLGHNVFIVIEKESEVQLVIEEAANVGVQPQVGLRVRLSSLASSKWADTGGEKAKFGLSAAQLLSVVERFRQAGLDQGVRLLHFHMGSQIANLADYQHGFKEAIRYYGELRALGLPVDHIDVGGGLGVDYDGTHSRNASSINYDIDDYAGVVVGMLKEFCDAQGLPHPHIFSESGRALTAHHAVLITQVTDVERHNDDVPKIVDLDEQPEIVRWLAELLGPTDAEMVTETYWRATHYIGDAAAQYADGKISLAQKALAEQCYFAICRRLHNQLKARQRSHRQVLDELNDKLADKYICNFSVFQSLPDTWAIGQVLPILPLHRLGEEPDRRAVLQDLTCDSDGKITQYVDEQSIETSLPVHEVKEGEDYLIGVFLVGAYQEILGDMHNLFGDTDSVNVYQRADGGIYHAGIETHDTIEDMLRYVHLSPEELMTLYRDKVAGAKLTARERNQYLDALRLGLTRSAYLS

SEQ ID NO: 12062 - protein, 156 aa, Pseudomonas aeruginosa
MDIRKVKKLIELLEESGIDELEIREGEESVRISRHSKTAAQPVYAQAPAFAAPVAAPAPAAAAPAAAAAESAPAAPKLNGNVVRSPMVGTFYRAASPTSANFVEVGQSVKKGDILCIVEAMKMMNHIEAEVSGTIESILVENGQPVEFDQPLFTIV

SEQ ID NO: 12063 - protein, 449 aa, Pseudomonas aeruginosa
MLEKVLIANRGEIALRILRACKELGIKTVAVHSTADRELMHLSLADESVCIGPAPATQSYLQIPAIIAAAEVTGATAIHPGYGFLAENADFAEQIERSGFTFVGPTAEVIRLMGDKVSAKDAMKRAGVPTVPGSDGPLPEDEETALAIAREVGYPVIIKAAGGGGGRGMRVVYDESELIKSAKLTRTEAGAAFGNPMVYLEKFLTNPRHVEVQVLSDGQGNAIHLGDRDCSLQRRHQKVIEEAPAPGIDEKARQEVFARCVQACIEIGYRGAGTFEFLYENGRFYFIEMNTRVQVEHPVSEMVTGVDIVKEMLRIASGEKLSIRQEDVVIRGHALECRINAEDPKTFMPSPGKVKHFHAPGGNGVRVDSHLYSGYSVPPNYDSLVGKVITYGADRDEALARMRNALDELIVDGIKTNTELHKDLVRDAAFCKGGVNIHYLEKKLGMDKH

SEQ ID NO: 12064 - protein, 332 aa, Pseudomonas aeruginosa
MSVVRIGPYTLPNRLILAPMAGVTDRPFRQLCRRLGAGMVVSEMVTSDVRLWNSRKSRLRLIHDGEDEPRSVQIAGGDPAMLAEAAQRNVELGAQIIDINMGCPAKKVCNKAAGSALLRDEALVAEILDAVVRAVDVPVTLKIRTGWDRDNRNGVTVAKLAEQAGIQALAVHGRTRADLYTGEAEYETIAAIKQAVSIPVFANGDIDSPEKARKVIEQTGVDALLIGRAAQGRPWIFREIDHYLRTGEHLPAAPLPEVQSILLEHLAELHLFYGEEMGVRIARKHVGWYLATLPGAREFRAQFNRLQDTDAQCASVRQFFAERQNNGTGVAA

SEQ ID NO: 12065 - protein, 100 aa, Pseudomonas aeruginosa
MDLSPREKDKLLIFTAGLLAERRLARGLKLNYPEAVALISAALLEGARDGRSVAELMHYGTTLLNREQVMEGVPEMIPDIQVEATFPDGTKLVTVHQPIA

SEQ ID NO: 12066 - protein, 101 aa, Pseudomonas aeruginosa
MIPGEYDIQPGDIELNAGRRTLALSVANTGDRPIQVGSHYHFFEVNDALAFDRPATRGMRLNIAAGTAVRFEPGQSREVELVEIGGGRRVYGFAGRVMGDL

SEQ ID NO: 12067 - protein, 204 aa, Pseudomonas aeruginosa
MTSQPLRVGIGGPVGSGKTALTLALCRELRERYNLAVVTNDIYTQEDAEFLVRNEALAPERIIGVETGGCPHTAIREDASINLEAVDQLNRRFPGLELILVESGGDNLSATFSPELSDLTLYVIDVSAGDKIPRKGGPGICKSDLLVINKIDLAPLVGASLDVMDRDARRMRGDKPFVFSNQKTGQGLDEIIAFIERQGLLTAA

SEQ ID NO: 12068 - protein, 310 aa, Pseudomonas aeruginosa
MHSLRFFSNAEVAERLAYPQLIEALRIGLAKPCSAPLRNCHALPAQASLLQMPVWQAGAGIGVKLVTVFPGNGARGLPAVAAVFALFDGEDGRPLALLEASELTARRTACSSALAADYLARDDARRLLVVGCGTLAAHMVRAHACVRDYRHIDIWGRDPAKAAALAARLREEGYPARAADGLRAAVEAADCVSCVTTSREALVRGAWLKPGVHLDLVGAFLPSMRETDVLAVARARVVVDTRAGALEEAGDLLQAIAEGAIGREAISTELRDLLSGAGRRGDPGEITLFKSVGYALEDLVAARRVVDNAA

SEQ ID NO: 12069 - protein, 275 aa, Pseudomonas aeruginosa
MQQIQRDIAQALQVQPPFQSEADVQAQIARRIAFIQQCLKDSGLKTLVLGISGGVDSLTAGLLAQRAVEQLREQTGDQAYRFIAVRLPYQVQQDEADAQASLATIRADEEQTVNIGPSVKALAEQLEALEGLEPAKSDFVIGNIKARIRMVAQYAIAGARGGLVIGTDHAAEAVMGFFTKFGDGACDLAPLSGLAKHQVRALARALGAPENLVEKIPTADLEDLRPGHPDEASHGVTYAEIDAFLHGQPLREEAARVIVDTYHKTQHKRELPKAP

SEQ ID NO: 12070 - protein, 195 aa, Pseudomonas aeruginosa
MTLRSVCVFCGASPGASPVYQEAAVALGRHLAERGLTLVYGGGAVGLMGTVADAALAAGGEVIGIIPQSLQEAEIGHKGLTRLEVVDGMHARKARMAELADAFIALPGGLGTLEELFEVWTWGQLGYHAKPLGLLEVNGFYDPLLTFLDHLVDERFVRAEHRGMLQRGASPEALLDALAAWTPSVAPKWVDRTPQ

SEQ ID NO: 12071 - protein, 358 aa, Pseudomonas aeruginosa
MRPLVATVDLSAIRHNYALAKRCAPQRQAFAVVKANAYGHGAREVVTALHDDADGFAVACLEEAAEVRALHASARILLLEGCFEASEYALAGQLRLDLVIQGAEQGEAFLAAGLDIPLNVWLKLDSGMHRLGFDPAALRAWHARLRSHPGVRELNLISHFACADERNHPLTEQQLESFLGLLDLDFDQRSLANSAAVLTIPAAHMDWLRPGIMLYGSTPLADLSAAELGLKPAMSLGAQLISLREVAVGESVGYGATWIAERPARIGTVSCGYADGYPRTAPAGTPVLVGGRRAILAGRVSMDMLAVDLSDLPEARVGDPVELWGAGLSVDEVARACGTLGYELLSKVTARVPRRYSH

SEQ ID NO: 12072 - protein, 464 aa, Pseudomonas aeruginosa
MNEITSPEQYDLETTALKVPPHSIEAEQAVLGGLMLDNNAWERVSDSVSDGDFYRHDHRLIFRAIYKLAEANQPIDVVTLSEQLEKEGQLAQVGGLAYLGELAKNIPSVANIKAYAQIIRERATLRQLIGISNEIADSAFHPEGRGANEILDEAERKIFEVAEARPKTGGPVGISDILVKTIDRIDYLFNTTEALTGVSTGFTDLDEKTSGLQPADLIIVAGRPSMGKTTFAMNLVENAVMRTDKAVLVYSLEMPSDSIVMRMLSSLGRIDQTKVRSGKLDDEDWPRLTSAINLLNDKKLFIDDTAGISPSEMRARTRRLVREHGDLALIMIDYLQLMQIPGSSGDNRTNEISEISRSLKALAKEFNCPVIALSQLNRSLEQRPNKRPVNSDLRESGAIEQDADVIMFVYRDEVYHPETEFKGVAEIIIGKQRNGPIGTVRLAFIGKYTRFENLAAGMYNFEDE

SEQ ID NO: 12073 - protein, 148 aa, Pseudomonas aeruginosa
MEVILLEKVANLGNLGDKVNIKGGYARNFLLPQGKATVATAENVAAFEARRAELEKAAAEKKAAAEARAAQLSELVVTLGAHAGDEGKLFGSIGTRDIAEAVSAAGYPLEKAEVRLPNGALRNTGEFDVAVHLHTDVETTLKLIIVAE

SEQ ID NO: 12074 - protein, 76 aa, Pseudomonas aeruginosa
MARFFRRRKFCRFTAEGVKEIDYKDLNTLKAYVSETGKIVPSRITGTKAKYQRQLATAIKRARYLALLPYTDSHGR

SEQ ID NO: 12075 - protein, 139 aa, Pseudomonas aeruginosa
MRHYEIVFLVHPDQSEQVGGMVERYTKAIEEDGGKIHRLEDWGRRQLAYAINNVHKAHYVLMNVECSAKALAELEDNFRYNDAVIRNLVMRRDEAVTEQSEMLKAEESRNERRERRERPNDNAEGADGDDNSDSDNADE

SEQ ID NO: 12076 - protein, 430 aa, Pseudomonas aeruginosa
MGKNVVVLGTQWGDEGKGKIVDLLTEQAAAVVRYQGGHNAGHTLVIDGEKTVLHLIPSGILREGVQCLIGNGVVLAPDALLREITKLEEKGVPVRERLRISPSCPLILSYHVALDQAREKARGEAKIGTTGRGIGPAYEDKVARRGLRVGDLFHRERFAAKLGELLDYHNFVLQHYYKEPAIDFQKTLDEAMEYAELLKPMMADVAATLHDLRKHGKDIMFEGAQGSLLDIDHGTYPYVTSSNTTAGGTATGSGFGPLYLDYVLGITKAYTTRVGSGPFPTELFDDVGAYLAKRGHEFGATTGRARRCGWFDAVILRRAIEINSISGLCLTKLDVLDGLDVVRLCVGYKNADGDVLEAPTDADSYIGLQPVYEEMPGWSESTVGAKTLEELPANARAYIKRVEELVGAPIDIISTGPDRNETIILRHPFA

SEQ ID NO: 12077 - protein, 633 aa, Pseudomonas aeruginosa
MSEAPRIQLLSPRLANQIAAGEVVERPASVAKELLENSLDAGSRRIDVEVEQGGIKLLRVRDDGRGIPADDLPLALARHATSKIRELEDLERVMSLGFRGEALASISSVARLTMTSRTADAGEAWQVETEGRDMQPRVQPAAHPVGTSVEVRDLFFNTPARRKFLRAEKTEFDHLQEVIKRLALARFDVAFHLRHNGKTIFALHEARDELARARRVGAVCGQAFLEQALPIEVERNGLHLWGWVGLPTFSRSQPDLQYFYVNGRMVRDKLVAHAVRQAYRDVLYNGRHPTFVLFFEVDPAVVDVNVHPTKHEVRFRDSRMVHDFLYGTLHRALGEVRPDDQLAPPGATSLTEPRPTGAAAGEFGPQGEMRLAESVLESPAARVGWSGGSSASGGSSGYSAYTRPEAPPSLAEAGGAYKAYFAPLPAGEAPAALPESAQDIPPLGYALAQLKGIYILAENAHGLVLVDMHAAHERITYERLKVAMASEGLRGQPLLVPESIAVSEREADCAEEHSSWFQRLGFELQRLGPESLAIRQIPALLKQAEATQLVRDVIADLLEYGTSDRIQAHLNELLGTMACHGAVRANRRLTLPEMNALLRDMEITERSGQCNHGRPTWTQLGLDELDKLFLRGR

SEQ ID NO: 12078 - protein, 470 aa, Pseudomonas aeruginosa
MADGKERLQLTRALASRHIFMLSLGGVIGTGLFMGSGVTINQGGPAGAVLAYLVAGVLMYLVMVCLGELSVQMPVSGSFQAHATRFIGPATGFMIGWVYWMSWASTVGLEFTAAGMLMTRWFPEVPVWLWSGFFVVVLFSLNALATRAFGEAEYWFAGIKVAAILVFIVVGGLVIFGGIELKSGAPAPMFSNLVGERLFPNGLSAVFAVMMTVVYAFQGCEIMGVAAGETERPEKSIPRAVRNVVFRVLIFYVLAIVVLSAIIPWQQAGLMESPFVQVFDMVGIPYAADLMNFVILTAILSVGNSGLYASTRILWAMSRSGMAPRGLSKLSARGVPLYALLITLCFALLSLLTSVVAADTLFMVLMAVSGMSGTVTWIVIAYAQYRFRREHMASGGTVAELKYAAPLFPLVPLACIAVCCSLFVFLALDPTQRPSLYWGFGFIAACYLAYYVVRRRQPQGLGDPALGRAG

SEQ ID NO: 12079 - protein, 474 aa, Pseudomonas aeruginosa
MKLSMPRFDQAPVLVVGDVMLDRYWHGATSRISPEAPVPVVRVEQHEDRPGGAANVALNIAALGAQALLVGVTGRDEAADSLANSLKAAGVDARFQRIDSQPTIVKLRVMSRHQQLLRVDFEEPFRTDAAALAVDVESLLAKVKVLVLSDYGKGALQNHQVLIQAARARNIPVLADPKGKDFAIYRGASLITPNLSEFETIVGRCADEAELVAKGQALMSELDLGALLVTRGEHGMTLLRHGQPALHLPARAREVFDVTGAGDTVISTLAAALAAGEELPSAVGLANLAAGIVVGKLGTAAISAPELRRAVQREQGSERGVLGLEQLLLAIEDARAHGEKIVFTNGCFDILHAGHVTYLEQARAQGDRLIVGVNDDASVTRLKGVGRPINSVDRRMAVLAGLGAVDWVVSFAEDTPERLLEQVRPDVLVKGGDYGVEQVVGAQIVKAYGGEVRVLGLVENSSTTAIVEKIRQKG

SEQ ID NO: 12080 - protein, 477 aa, Pseudomonas aeruginosa
MSERLNSDRLNNDFQFIEVGRKDPKKKLLRQRKREFVEIHDLFKPQQAADQAHRCLGCGNPYCEWKCPVHNFIPNWLKLVSEGNILAAAELSHQTNTLPEVCGRVCPQDRLCEGACTLNDGFGAVTIGSVEKYITDTAFAMGWRPDLSKVKPTGRRVAVIGAGPAGLGCADVLVRNGVTPVVFDRNPEIGGLLTFGIPEFKLEKHVLSRRREVFTGMGIEFRLNTEIGKDVTMEQLLDEYDAVFMGMGTYTYMKGGFPGEDLPGVHDALDFLIANVNRNLGFEKSAEDFVDMKGKRVVVLGGGDTAMDCNRTSIRQGAKSVTCAYRRDEENMPGSRKEVKNAKEEGVKFLFNRQPIAIVGEDRVEGVKVVETRLGEPDARGRRSPEPIPGSEEIIPAEAVLIAFGFRPSPAPWFERFEIATDSQGRVVAPAQAQFKHQTSNPKIFAGGDMVRGSDLVVTAIFEGRTAAEGILDYLGV

SEQ ID NO: 12081 - protein, 1481 aa, Pseudomonas aeruginosa
MKAGLYHPETFKDNCGFGLIAHMQGEPSHQLLQTAIEALTCMTHRGGINADGKTGDGCGLLIQKPDLFLRAVAREAFSVDLPEQYAVGMVFFNQDPVKAEAARENMNREIVAAGLELVGWRKVPIDTSVLGRLALERLPQIEQVFIGGAGLSDQDFAIKLFSARRRSSVANAADSDHYICSFSHKTIIYKGLMMPADLAAFYPDLGDERLQTAICVFHQRFSTNTLPKWPLAQPFRFLAHNGEINTITGNRNWAQARRTKFTNELIPDLEELGPLVNRVGSDSSSMDNMLELMVTGGMDLFRGLRMIIPPAWQNVETMDADLRAFYEYNSLHMEPWDGPAGVVLTDGRYAVCLLDRNGLRPSRWVTTKNGYITLASEIGVWDYKPEDVIAKGRVGPGQILAVDTETGQVLHSDDIDNRLKSRHPYKQWLRQNALRIQATLDDDHGVASYDADQLKQFMKMFQVTFEERDQVLRPLGEQGQEAVGSMGDDTPMAILSRRIRSPYDYFRQQFAQVTNPPIDPLREAIVMSLETCLGVEQNIFEEAPHHANQAILTTPVISPAKWRTIMTLDRPGFDRHFIDLNYDESMGLEAAVRNIADQAEEAVRGGKVLLILSDRHIAPGKLPVHAALAVGAVHHRLVQTGLRCDSNILVETATARDPHHFAVLIGFGASAVYPFLAYEVLADLIRTGEVLGDLYEVFKYYRKGISKGLMKILSKMGISTVASYRGAQLFEAVGLSDEVTDLCFTGVASRIQGARFVDIENEQKLLAAEAWSNRKPIQQGGLLKFVYGGEYHAYNPDVVNTLQAAVQQGDYEKFKEYTALVDQRPVSMIRDLLQVKTAAQPLALDEVEPLEAIFKRFDAAGISLGALSPEAHEALAEAMNTLGGRSNSGEGGEDPARYGTLKSSKIKQVATGRFGVTPEYLVNAEVLQIKVAQGAKPGEGGQLPGGKVNGLIARLRYAVPGVTLISPPPHHDIYSIEDLAQLIFDLKQVNPQALVSVKLVSEPGVGTIAAGVAKAYADLITISGYDGGTGASPITSIKYAGSPWELGLAETHQTLRGNDLRGKVRVQTDGGLKTGLDVIKAAILGAESFGFGTAPMIALGCKYLRICHLNNCATGVATQNDKLRKDHFIGTTAMVINFFTFIATETREWLARLGVRSLGELIGRTDLLEILPGETAKQQNLDLAPLLGSELIPADKPQFCEVEKNPPFDQGLLAEKMVELSKAAIEGLSGGEYELDICNCDRSIGARVSGEIARLHGNQGMAKAPVVFRFKGTAGQSFGVWNAGGLHLYLEGDANDYVGKGMTGGKLVITPPKGSPFKTQESAIVGNTCLYGATGGKLFAAGTAGERFAVRNSGSHAVVEGTGDHCCEYMTGGFVCVLGKTGYNFGSGMTGGFAYVLDMDNTFVDRVNHELVEIQRISGEAMEAYRSHLRKVLVEYVNETASEWGANILENLDDYLRRFWLVKPKAASLGSLLTSTRANPQ

SEQ ID NO: 12082 - protein, 587 aa, Pseudomonas aeruginosa
MKDTIRQLIQQALDQLTADGTLPAGLTPDIQVENTKDRSHGDFASNIAMMLAKPAGMKPRDLAARLVEAIPAHEQLAKVEIAGPGFLNFFQDHVWLAASLDRALADERLGVRKAGPAQRVVIDLSSPNLAKEMHVGHLRSTIIGDAVARVLEFLGDTVIRQNHVGDWGTQFGMLLAYLEEQPVDAEAELHDLEVFYRAAKKRFDESPEFADRARELVVKLQAGDPDCLRLWTRFNEISLSHCQKVYDRLGVKLSMADVMGESAYNDDLAQVVADLTAKGLLTEDNGALCVFLEEFKNAEGNPLPVIVQKAGGGYLYATTDLAAMRYRHNVLHADRVLYFVDQRQALHFQQVFEVARRAGFVPAGMELEHMGFGTMNGADGRPFKTRDGGTVKLIDLLEEAESRAYALVKERNEQRAERGEEPFDEVQLREIGRVVGIDSVKYADLSKHRTSDYSFNFELMLSFEGNTAPYLLYACTRVASVFRKLGQGREQLGGKIVLEQPQELALAAQLAQFGDLINNVALKGVPHLLCAYLYELAGLFSSFYEHCPILTAEDPAQKDSRLRLAALTGRTLEQGLELLGLKTLERM

SEQ ID NO: 12083 - protein, 177 aa, Pseudomonas aeruginosa
MTTIVSVRRNGKVVMGGDGQVSLGNTVMKGNAKKVRRLYHGQVLAGFAGATADAFTLFERFEQQLEKHQGHLVRAAVELAKDWRTDRSLSRLEAMLAVANKDASLIITGNGDVVEPEHGLIAMGSGGGFAQAAALALLQHNAELSAREVAETALNIAGSICVFTNQNLTIEELDSAV

SEQ ID NO: 12084 - protein, 256 aa, Pseudomonas aeruginosa
MNDPRKGADAEPTTHFGYQNVPESQKAKKVAEVFHSVAAKYDLMNDLMSGGIHRLWKRFTIELSGVRSGNRVLDIAGGTGDLTRQFSRLVGPTGEVVLADINASMLKVGRDKLLDKGVSGNVSFVQADAEKLPFPDNHFDCVTIAFGLRNVTHKDEAIRSMLRVLKPGGRLLVLEFSKPSSNLLSKAYDAYSFSLLPLMGKLVTNDSESYRYLAESIRMHPDQETLKAMMVEAGFDRVTYHNMTGGIVALHRGIKP

SEQ ID NO: 12085 - protein, 509 aa, Pseudomonas aeruginosa
MSLHLKPGQLTLADLRQAYLAPVRLSLDPSADAPIAASVACVENIIAEGRTAYGINTGFGLLASTRISPADLEKLQRSIVLSHAAGVGEALDDAMVRLVMLLKVNSLARGFSGIRRKVIDALIALINAEVYPHIPLKGSVGASGDLAPLAHMSLVLIGESRARHRGEWLPAAEALAVAGLEPLTLAAKEGLALLNGTQVSTAYALRGLFEAEDLFAAATVCGGLSVEAMLGSRAPFDARIHAARGQRGQIDVAAAYRDLLTASSEVARSHEKCDKVQDPYSLRCQPQVMGACLTQMRQAAEVLEIEANAVSDNPLVFAAEGDVISGGNFHAEPVAMAADNLALALAEIGSLSERRISLMMDMHMSQLPPFLVANGGVNSGFMIAQVTAAALASDNKALAHPASVDSLPTSANQEDHVSMAPNAGKRLWAMAENVRGILAVEWLGACQGLDFREGLKSSPKLEQARRLLRDKVPYYQEDRFFAPDIEAASQLLASGCLNALLPARLLPSL

SEQ ID NO: 12086 - protein, 559 aa, Pseudomonas aeruginosa
MTTPSKFRDIEIRAPRGTTLTAKSWLTEAPLRMLMNNLDPEVAENPRELVVYGGIGRAARNWECYDRIVETLKQLNDDETLLVQSGKPVGVFKTHANAPRVLIANSNLVPHWATWEHFNELDAKGLAMYGQMTAGSWIYIGSQGIVQGTYETFVEAGRQHYDGNLKGRWVLTAGLGGMGGAQPLAATLAGACSLNIECQQSRIDFRLRSRYVDEQAKDLDDALARIQRYTAEGKAISIALLGNAAEILPELVRRGVRPDMVTDQTSAHDPLNGYLPAGWSWEEYRDRAQTDPAAVVKAAKQSMAVHVRAMLAFQQQGVPTFDYGNNIRQMAKEEGVANAFDFPGFVPAYIRPLFCRGIGPFRWAALSGDPQDIYKTDAKVKQLIPDDAHLHRWLDMARERISFQGLPARICWVGLGLRAKLGLAFNEMVRTGELSAPIVIGRDHLDSGSVASPNRETEAMQDGSDAVSDWPLLNALLNTASGATWVSLHHGGGVGMGFSQHSGMVIVCDGSDEAAERIARVLTNDPGTGVMRHADAGYQVAIDCAKEQGLNLPMITAQR

SEQ ID NO: 12087 - protein, 605 aa, Pseudomonas aeruginosa
MIENLRNIAIIAHVDHGKTTLVDKLLKLSGTLDRKEAESERVMDSNDQEKERGITILAKNTAIKWNGYNINIVDTPGHADFGGEVERVMSMVDSVLLVVDAQDGPMPQTRFVTQKAFKAGLRPIVVVNKIDRPGARPDWVIDQIFDLFDNLGATDEQLDFPIVYASALNGIAGLDHEKMDDNMDALFQAIIDHVPAPVVDTEGPFQMQISQLDYNSFLGVIGIGRITRGKVKSNTPVVAISDDGSKRNGRILKIMGHHGLQRVEVAEAEAGDIVCVSGMEELFISDTLCDPQNVEALPPLTVDQPTVSMTFQVNDSPFAGREGKFVTSRNIKERLEKELLHNVALRVEPGDSPEKFKVSGRGELHLSVLIETMRREGFELAVGRPEVVIIEKDGEKQEPYENVTIDIEEQHQGSVMEQMGLRKGDLSNMIPDGKGRVRLEYTIPARGLIGFRNNFLTLTSGTGILTSTFSHYGPIKAGEVSNRQNGVLVSMATGTALTYSLETLQSRGKLFLGPGDEIYEGQLAGINSRDNDLVINPTKGKKLDNMRASGKDEVIALVPPIRFTLEQALEFIADDELVEVTPKSIRLRKKMLNENDRKRYERSKV

SEQ ID NO: 12088 - protein, 469 aa, Pseudomonas aeruginosa
MSYKSHQLIKDHDVKWVDLRFTDTKGKQQHVTMPARDALDDEFFEAGKMFDGSSIAGWKGIEASDMILMPDDSTAVLDPFTEEPTLILVCDIIEPSTMQGYERDPRNIAKRAEEYLKSTGIGDTVFVGPEPEFFIFDEVKFKSDISGSMFKIFSEQASWNTDADIESGNKGHRPGVKGGYFPVPPVDHDHEIRTAMCNALEEMGLVVEVHHHEVATAGQNEIGVKFNTLVAKADEVQTLKYCVHNVADAYGKTVTFMPKPLYGDNGSGMHVHMSISKDGKNTFAGEGYAGLSETALYFIGGIIKHGKALNGFTNPSTNSYKRLVPGFEAPVMLAYSARNRSASIRIPYVSSPKARRIEARFPDPAANPYLAFAALLMAGLDGIQNKIHPGDAADKNLYDLPPEEAKEIPQVCGSLKEALEELDKGRAFLTKGGVFTDEFIDAYIELKSEEEIKVRTFVHPLEYDLYYSV

SEQ ID NO: 12089 - protein, 735 aa, Pseudomonas aeruginosa
MPIIARFTLRSRVLAALLLCLCAALFYSPPGAAALPNPLAGSSSGGEKVSDAQLEQSLNQVIQTLENDRQRADLLKKLKQLRDVTKKGKESEGGVLGLIGDTLTSLEKQFQGANSPVALWGNQFQLARAELEERFPSWRDLPAMVFDFSVVILLWACLASALLWLSRRMRERFGLSAELPQHPKTRDLLLFSLRKLGPWLVAFLITLYLSVVLPDSLSKTLAMVMAYVLVCGTLFSALCVISLSLLSGPHRQRALDILRRQAFRPLWLIGSLAALGEVAHDPRLIAGLGEHTSICLSTLANASAALFTALFVMRFRRPIAHLIRNQPLERRLKRRSLHDLVQLVGSLWFVPVLVLVGISLFATFVSAGDSSSALRRALVCAVLAVVAMTVIGLIRRRSSRVGAGPRRSAPYIEQLQSFGYTLLHIFVVLFFIEVALRVWGMSLIRYAEGEGEQISMKVVSFGTTLLVAWLIWILTDTAIQHSLGLGGKSRPNTRALTMLPLIRNVLFATIAVIALIVALANMGMNVTPLLAGAGVIGLAIGFGAQSLVADLITGLFIIIEDSLSIDDYVDVGGHLGTVEGLTIRTVRLRDLDGVVHTIPFSEIKSIKNYSRQFGYAMFRWPVPASMPIDDAVALVREVAMELRSDPAVYRNLWSPMELQGVESFDNGQAILRFRFKTAPIKQWEVQRAFNLRLRRRLDQAGLELSMPRLNVQLSRAPKAKSAEPDEQGTPADGGI

SEQ ID NO: 12090 - protein, 310 aa, Pseudomonas aeruginosa
MRIVVALGGNALLRRGEPMTADNQRENVRIAAEQIAKVAPGNELVIAHGNGPQVGLLALQGAAYDKVSPYPLDVLGAETEGMIGYMIEQEMGNLLPFEVPFATILTQVEVDGKDPAFQNPTKPIGPVYSREEAERLAAEKGWSIAPDGDKFRRVVPSPRPKRIFEIRPVKWLLEKGTIVICAGGGGIPTMYDEAGKKLSGVEAVIDKDLCSSLLAQELVADILIIATDVDAAYVDWGKPTQKAIAQAHPDELERLGFAAGSMGPKVQAAIEFARATGKDAVIGSLADIVAITEGKAGTRVSTRKAGIEYR

SEQ ID NO: 12091 - protein, 513 aa, Pseudomonas aeruginosa
MTQANNAVYTDISAAQLVEEAIRRGEGELAANGSLVVRTGHRTGRSPVDRFIVEEPSTKDAIAWGNINRPFPADKFDALWARVEAFNNAQDHFVSHVHVGSAEAYYLPVKMTTATAWQNLFGRCLFIEPEQYNPAGKDEWQVLNVANFECVPERDGTNSDGCVILNFAQKKVLIAGMRYAGEMKKAMFSVQNFLLPERDVLPMHCAANIGEAGDVTLFFGLSGTGKTTLSADESRYLIGDDEHGWGEGVVFNVEGGCYAKCIDLSEKNEPVIWKAIKFGAVLENVVLDEERVPNYADDSLTQNSRAAYPLEHVEKRSEKNLGGEPNAVIFLTCDLTGVLPPVSILNNEQAAYHFLSGYTALVGSTEMGSGGGIKSTFSTCFGAPFFPRPAGVYAELLIKRIKAFGSKVYLVNTGWTGGGYGVGKRFNIPTTRGVIAAIQSGALIGAETEHLEIINLDVPKAVPGVETNLLNPRNTWADKAAYDEAAKGLAKQFIENFKKFEVSDAIKAAGPQL

SEQ ID NO: 12092 - protein, 131 aa, Pseudomonas aeruginosa
MSEKDDDKVRLDKWLWAARFFKTRALAKAAIEGGKVHCRGERCKPSKEPRVGEELTIRTGFDERTVTIRALAVVRRGAQEAQALYEETADSVESRERAAAMRKAGALGVQTEGRPSKKQRRQIHQLRGGQD

SEQ ID NO: 12093 - protein, 779 aa, Pseudomonas aeruginosa
MDSINTRIAEELSALPSGRVQPQQVAAAVALLDEGSTVPFIARYRKEVTGSLDDTQLRMLEERLRYLRELEERRGAILASIEEQGKLTPELARDIKLADTKTRLEDLYLPYKQKRRTKGQIALEAGLGALADALFDDPTLVPESEAARFVDAEKGFADVKAVLEGAKYILMERFAEDATLLDKLRVFMKNEATLTARVVPGKEQEGAKFSDYFEHDEPLKSAPSHRALAIFRGRNEGVLSASLKVGEEAPGTLHPCEVMIAERFGLSNQGRAADKWLAEVVRWTWKVKLYTHLETDLFGELRDGAEDEAISVFARNLHDLLLAAPAGPRATLGLDPGLRTGVKVAVVDATGKLLDTATVYPHAPKNQWDQTLAVLAALCAKHQVELIAIGNGTASRETDKLAGELIKKYPGMKLTKIMVSEAGASVYSASELAAKEFPELDVSLRGAVSIARRLQDPLAELVKIEPKSIGVGQYQHDVSQLKLARSLDAVVEDCVNAVGVDVNTASAALLARISGLNSTLAQNIVAHRDANGAFRTRDELKKVSRLGEKTFEQAAGFLRVMNGDNPLDASAVHPETYPLVQRIAADTERDIRSLIGDSAFLKRLDPKKFTDETFGLPTVTDILKELDKPGRDPRPEFKTAEFQEGVESLKDLKPGMVLEGVVTNVTNFGAFVDIGVHQDGLVHISALSEKFVKDPYEVVKAGDIVKVKVMEVDIPRNRVGLSMRMSDTPGEKVEGQRGGRPTGSGQPRQERGAPRGQSAPPANNAMAALFANAKQLKKK

SEQ ID NO: 12094 - protein, 360 aa, Pseudomonas aeruginosa
MGLRTPLYELHVALGAKMVDFGGWDMPLHYGSQVEEHHQVRRDCGVFDVSHMTVVDVAGEQATAYLQHLLANDVARLGETGKALYSAMLNEEGGVVDDLIVYLTEHGYRVVVNASTRDKDIAWMQAQAAGFKVDLQERGDLAMLAIQGPNARVHSSELVSPARAALIRELKPFQGRAEGDWFIARTGYTGEDGLEIMLPAAEAPGFLNELVGAGISPAGLGARDTLRLEAGLNLYGQDMDESVSPLAANMGWTVAWEPVARDFVGRRALEAQKAAGDQPKLVGLVLEERGVLRAHQVVRVAGIGEGEITSGSFSPTLNKSIALARVPAATGDRAEVEIRGKWYPVRVVQPSFVRHGKPLI

SEQ ID NO: 12095 - protein, 419 aa, Pseudomonas aeruginosa
MNLTELKQKPIAELLEMSDAMGLENMARSRKQDIIFALLKKHAKSGEEISGDGVLEILQDGFGFLRSADSSYLAGPDDIYVSPSQIRRFNLRTGDTIIGKIRPPKEGERYFALLKVDSINFDRPENAKNKILFENLTPLFPNERMKMEAGNGSTEDLTGRVIDLCAPIGKGQRGLIVAPPKAGKTIMLQNIASNITRNNPECHLIVLLIDERPEEVTEMQRTVRGEVVASTFDEPPTRHVQVAEMVIEKAKRLVEHKKDVVILLDSITRLARAYNTVIPSSGKVLTGGVDAHALEKPKRFFGAARNIEEGGSLTILATALVETGSKMDEVIYEEFKGTGNMELPLDRKIAEKRVFPAININRSGTRREELLTSEDELQRMWILRKILHPMDEISAIEFLIDKLKQTKTNDEFFDSMKRK

SEQ ID NO: 12096 - protein, 337 aa, Pseudomonas aeruginosa
MSFTPANRAYPYTRLRRNRRDDFSRRLVRENVLTVDDLILPVFVLDGVNQRESIPSMPGVERLSIDQLLIEAEEWVALGIPALALFPVTPVEKKSLDAAEAYNPEGIAQRATRALRERFPELGIITDVALDPFTTHGQDGILDDDGYVLNDVSIDVLVRQALSHAEAGAQVVAPSDMMDGRIGAIREALESAGHTNVRIMAYSAKYASAYYGPFRDAVGSASNLGKGNKATYQMDPANSDEALHEVAADLAEGADMVMVKPGMPYLDIVRRVKDEFRAPTFVYQVSGEYAMHMGAIQNGWLAESVILESLTAFKRAGADGILTYFAKQAAEQLRRGR

SEQ ID NO: 12097 - protein, 313 aa, Pseudomonas aeruginosa
MSSREIRIATRQSALALWQAEYVKARLEQAHPGLTVTLLPMTSRGDKLLDAPLAKIGGKGLFVKELETALLEGAADIAVHSMKDVPMDFPEGLGLYTICEREDPRDAFVSNTYASLEQLPAGSVVGTSSLRRQAQLLARRPDLQIRFLRGNVNTRLAKLDAGEYDAIILAAAGLIRLGFESRIRSSISVDDSLPAGGQGAVGIECRTADSDLHALLEPLHHTDTALRVTAERALNKRLNGGCQVPIACYAIREGDQLWLRGLVGQPDGTQLLRAEGRAPLAEAEALGVRVAEDLLEQGAEAILEAVYGEAGHP

SEQ ID NO: 12098 - protein, 248 aa, Pseudomonas aeruginosa
MNVLIVDDEPLARERLARLVGQLDGYRVLEPSASNGEEALTLIDSLKPDIVLLDIRMPGLDGLQVAARLCEREAPPAVIFCTAHDEFALEAFQVSAVGYLVKPVRSEDLAEALKKASRPNRVQLAALTKPPASGGSGPRSHISARTRKGIELIPLEEVIFFIADHKYVTLRHAQGEVLLDEPLKALEDEFGERFVRIHRNALVARERIERLQRTPLGHFQLYLKGLDGDALTVSRRHVAGVRRLMHQL

SEQ ID NO: 12099 - protein, 415 aa, Pseudomonas aeruginosa
MDTFSYRDAELFAEGVALSRIAERFGTPTYVYSRAHIEAQYRAYADALAGMPHLVCFAVKANSNLGVLNVLARLGAGFDIVSRGELERVLAAGGDPAKVVFSGVGKTRDDMRRALEVGVHCFNVESGEELERLQRVAAELGVKAPVSLRVNPDVDAQTHPYISTGLKENKFGIAIDEAEAVYARAAELDHLEVIGVDCHIGSQLTQLEPFLDALERLLGLVDRLAGKGIGIRHLDLGGGLGVRYRDEQPPLAGDYIRAIRERLHGRDLTLVFEPGRSIVANAGVLLTRVEYLKHTEHKDFAIVDAAMNDLIRPALYQAWMDVQAVRPRDAAPRRYDLVGPICETGDFLAKDRDLALAEGDLLAVRSAGAYGFVMSSNYNTRGRAAEVLVDGEQTHEVRRRETVQELYAGESLLPQ

SEQ ID NO: 12100 - protein, 677 aa, Pseudomonas aeruginosa
MQQAQVPLLLSIEEQNQVGMRVGGQGEILFFNAKTGVELKRVALPLPAGSEIRSIAQDQPGSPTVALGLSNGQVLVFQHTYKVTYPDNKKTITPEIAFPYGETPIGLDPQGRPLEHVSINAGDDSLLLAGSVDKQLLLLSMTREENMLTGESTLDEERIELPQIAEPVKAIYLDPRKQWLYVINGRATADVFDLHSRQLNGRYKLLEDPNAEVTASTQLLGGISLLVGDSKGGIAQWFMARDTDGEPRLSHVRDFNLDGAPISAIAPEQRRKGFIALDEKGNLGVFHSTAHRTLLVQPVADSSGVITLSPRANRLLLEQGGKIHRFALSNPHPEISWSALWGKVWYESYDKPAYVWQSTAATTDFEPKLSLSPLTFGTLKAAFYAMILAAPLAIAAAVYTAYFMAPAMRRKVKPVIELMEALPTVILGFFAGLFLAPYVEGHLPGVFSLLLLTPLGILLAGLLWSRLPERIRLSLPAGWEAALLIPVVLAVGAFALWLSPHLETTFFGGDMRLWLSHDLGITYDQRNALIVGLAMGFAVIPNIFSIAEDAIFSVPRSLTYGSLALGATPWQTLTRVVILTASPGIFSALMIGMGRAVGETMIVLMATGNTPVMEVNIFEGMRTLAANVAVEMPESEVGGSHYRVLFLSALVLLTFTFVMNTLAELIRQRLRKKYASL

SEQ ID NO: 12101 - protein, 561 aa, Pseudomonas aeruginosa
MSQEFDYIIIGAGSAGNVLATRLTEDADVSVLLLEAGGPDYRFDFRTQMPAALAFPLQGRRYNWAYETDPEPYMNNRRMECGRGKGLGGSSLINGMCYIRGNALDFDGWAKEPGLEDWSYLDCLPYFRKAETRDIGPNDYHGGDGPVSVTTPKAGNNPLFHAMVEAGVQAGYPRTDDLNGYQQEGFGPMDRTVTPEGRRAATGRGYLDQARGRPNLTIVTHALSDRILFSGKRAIGVSYLVGNGDNPVTAHARREVLVCSGAIASPQLLQRSGVGPAALLRDLDIPVVHDLPGVGANLQDHLELYLQYACKQPVSIYPATKWWNQPAIGAQWLFLGKGLGASNQFEAGGFIRTREAFEWPNIQFHFLPVAINYNGSKGVQEHGFQAHMGSMRSPSRGRIHLKSRDPRQHPSILFNYMSHEQDWQEFRDGIRLTREIMNQPALDPYRGRELSPGVSVQSDAELDEFIRNHAETAFHPSCSCKMGSDDMAVVDGQGRVHGMEGLRVVDASIMPLIITGNLNATTIMMAEKIADRIRGRQPLPRSTAKYYVAGDAPVRGNPVRA

SEQ ID NO: 12102 - protein, 490 aa, Pseudomonas aeruginosa
MARFEEQKLYIGGRYVEASSGATFETINPANGEVLAKVQRASREDVERAVQSAVEGQKVWAAMTAMQRSRILRRAVDILRERNDELAALETLDTGKPLAETRSVDIVTGADVLEYYAGLVPAIEGEQIPLRETSFVYTRREPLGVVAGIGAWNYPVQIALWKSAPALAAGNAMIFKPSEVTPLTALKLAEIYTEAGVPDGVFNVLTGSGREVGQWLTEHPLIEKISFTGGTSTGKKVMASASSSSLKEVTMELGGKSPLIIFPDADLDRAADIAVMANFFSSGQVCTNGTRVFIHRSQQARFEAKVLERVQRIRLGDPQDENTNFGPLVSFPHMESVLGYIESGKAQKARLLCGGERVTDGAFGKGAYVAPTVFTDCRDDMTIVREEIFGPVMSILVYDDEDEAIRRANDTEYGLAAGVVTQDLARAHRAIHRLEAGICWINTWGESPAEMPVGGYKQSGVGRENGLTTLAHYTRIKSVQVELGDYASVF

SEQ ID NO: 12103 - protein, 325 aa, Pseudomonas aeruginosa
MSPAELHADSIVIDGLIIAKWNRELFEDMRKGGLTAANCTVSVWEGFQATVNNIAASNKLIRDNSDLVIPVRSTADIRKAKEQGKTGILYGFQNAHAFEDQIGYVEVFKQLGVGIVQMCYNTQNLVGTGCYERDGGLSGFGREIVAEMNRVGIMCDLSHVGSKTSEEVILESKKPVCYSHCLPSGLKEHPRNKSDEELKFIADHGGFVGVTMFAPFLKKGIDSTIDDYAEAIEYVMNIVGEDAIGIGTDFTQGHGHDFFEWLTHDKGYARRLTNFGKIVNPLGIRTVGEFPNLTETLLERGMPERVVRKVMGENWVRVLRDVWGE

SEQ ID NO: 12104 - protein, 342 aa, Pseudomonas aeruginosa
MTLPQTMKAAVVHAYGAPLRIEEVKVPLPGPGQVLVKIEASGVCHTDLHAAEGDWPVKPPLPFIPGHEGVGYVAAVGSGVTRVKEGDRVGIPWLYTACGCCEHCLTGWETLCESQQNTGYSVNGGYAEYVLADPNYVGILPKNVEFAEIAPILCAGVTVYKGLKQTNARPGQWVAISGIGGLGHVAVQYARAMGLHVAAIDIDDAKLELARKLGASLTVNARQEDPVEVLQRDIGGAHGVLVTAVSNSAFGQAIGMARRGGTIALVGLPPGDFPTPIFDVVLKGLHIAGSIVGTRADLQEALDFAGEGLVKATIHPGKLDDINQILDQMRAGQIEGRIVLEM

SEQ ID NO: 12105 - protein, 488 aa, Pseudomonas aeruginosa
MSTPATPTSCDILVFGGTGDLALHKLLPALYRLHREDRLPADTRIFALARSALDNAAFLALAERNVRAVVARSEFAAEQWKGFAARLDYLAMDASQSADFGRLARHLKSSEGRVLVHYLATSPSLFAPIAQNLSIAGLAGPQARIVLEKPLGHSLDSARAINQSIGRVFDESRVFRIDHYLGKETVQNLMALRFANALFEPVWRAAHIDHVQISVNETLGVENRGGYYDHAGAMRDMVQNHLLQLLCLVAMEAPVRFDAEAVRNEKLKVLQALKPISGLDVQDKTVRGQYAAGRIGGQEVPAYYFEKNVDNDSDTETFVALQAEVENWRWAGVPFYLRTGKRMARKCSEIVIQFKPVPHSLIDGGGGPANRLWIRLQPEERISVQLMAKTPGKGMQLEPVELDLNLAEALSRNKRRWDAYERLLLDVIEGDSTLFMRRDEVEAAWGWVDPILAGWREHYQSPRPYPAGSNGPEQAQLLLELQGRRWLE

SEQ ID NO: 12106 - protein, 464 aa, Pseudomonas aeruginosa
MTATTLRPELLCPAGTLKSMRYAFAYGADAVYAGQPRYSLRVRNNDFDHAQLAEGIAEAHALGKRFYVVVNIAPHNAKLKTFLRDLEPVVAMGPDALIMSDPGLIMLVRQHFPQMPIHLSVQANAVNWAAVQFWRQQGLTRVILSRELSLEEIEEIRQQVPDMELEVFVHGALCMAYSGRCLLSGYINRRDPNQGTCTNACRWEYKAVEGREDELGNVVAREPTLGRGAPTEQVFLLEEGNRPGEPMAAFEDEHGTYIMNSKDLRAVQHVERLARIGVHSLKIEGRTKSHYYVARTAQVYRQAIDDAAAGKPFDRGLMDTLESLAHRGYTEGFLRRHVHDEYQNYQHGHSLSERQQFVGELTGERRDGLAEVEVKNRFQRGDSVELMTPRGNLSLRVEDLRNAAGEAIEVAPGNGHVVYLALPEGLDLCYALLMRDLQPGQDTRQPQAERSGGCAGKGACGCAH

SEQ ID NO: 12107 - protein, 595 aa, Pseudomonas aeruginosa
MSMPLPMKLRTRLFLSISALITVSLFGLLLGLFSVMQLGRAQEQRMSHHYATIEVSQQLRQLLGDQLVILLRETPDGQALERSQNDFRRVLEQGRANTVDSAEQAALDGVRDAYLQLQAHTPALLEAPMADNDGFSEAFNGLRLRLQDLQQLALAGISEAETSARHRAYLVAGLLGLVGVAILLIGFVTAHSIARRFGAPIETLARAADRIGEGDFDVTLPMTNVAEVGQLTRRFGLMAEALRQYRKTSVEEVLSGERRLQAVLDSIDDGLVIFDNQGRIEHANPVAIRQLFVSNDPHGKRIDEILSDVDVQEAVEKALLGEVQDEAMPDLVVDVAGESRLLAWSLYPVTHPGGHSVGAVLVVRDVTEQRAFERVRSEFVLRASHELRTPVTGMQMAFSLLRERLDFPAESREADLIQTVDEEMSRLVLLINDLLNFSRYQTGMQKLELASCDLVDLLTQAQQRFIPKGEARRVSLQLELGDELPRLQLDRLQIERVIDNLLENALRHSSEGGQIHLQARRQGDRVLIAVEDNGEGIPFSQQGRIFEPFVQVGRKKGGAGLGLALCKEIIQLHGGRIAVRSQPGQGARFYMLLPV

SEQ ID NO: 12108 - protein, 335 aa, Pseudomonas aeruginosa
MIEFHDVHKTYRVAGREIPALQPTRLNIQAGQIFGLIGHSGAGKSTLLRLINRLEEPSGGRILVEGEDVTALDAEGLRRFRQRVGMIFQHFNLLSSKTVADNIAMPLRLAGGFSRAEVDARVSELLARVGLSDHARKYPAQLSGGQKQRVGIARALACRPSILLCDEATSALDPQTTASVLQLLAEINRELKLTIVLITHEMDVIRRVCDQVAVMDGGAIVEQGDVADVFLHPQHPTTRRFVFEAERVDEDERHDDFAHVPGLILRLTFRGEATYAPLLGTVARQTGVDYSILSGRIDRIKDTPYGQLTLALVGGDLEAAMSQLNAADVHVEVLR

SEQ ID NO: 12109 - protein, 225 aa, Pseudomonas aeruginosa
MDFFETMSFANIDWYEIWLASVDTFWMLGGSLLFTVVLGLPLGVLLFLTGPRQMFEQKAVYTLLSLVVNILRSLPFIILLIVMIPLTVLITGTSLGVAGAIPPLVVGATPFFARLVETALREVDKGIIEATQAMGASTRQIIWNALLPEARPGIIAAITVTAITLVSYTAMAGVVGAGGLGDLAIRFGYQRFQTDVMVVTVVMLLILVQILQTVGDKLVVHFSRK

SEQ ID NO: 12110 - protein, 260 aa, Pseudomonas aeruginosa
MKKLLAAFSAVAALGLTAAQAAESLTVAATPVPHAEILNVVKPLLAKEGVDLKIKEFTDYVQPNVQVSEKRLDANFFQHQPYLDEFNKAKGTDLVAVTGVHIEPLGAYSSKYKKLDELPSGATVVIPNDATNGGRALLLLDKAGVIKLKDNKSITATPKDIVDNPKNIKIRELEAATLPRVLTQVDMALINTNYALEAKLNPTKDALAIEGSDSPYVNILVARPDNKDSDAMQKLAKALHSAEIKQFIQEKYKGAVVPAF

SEQ ID NO: 12111 - protein, 611 aa, Pseudomonas aeruginosa
MCGIVGAIAERNITPILIEGLKRLEYRGYDSAGVAVFDNEGRLQRCRRVGKVASLEEGLAGTPLLGRLGIAHTRWATHGAPTEGNAHPHFSSDEVAVVHNGIIENHEPLRERLKGLGYVFTSQTDTEVIVHLLHHKLQSIGDLTLALKDAVKELHGAYGLAVISAAQPDRIVAARSGSPLVIGLGLGENFLASDQLALRQVTDRFIYLEEGDIAEIRRDSVRLWDVQGNDVQRETVQYHEGAEAADKGEYRHFMLKEIHEQPSVVQRTLEGRLGQNQVLVESFGPQAAELFAKVRNVQIVACGTSYHAGMVARYWLESLTGIPCQVEVASEFRYRKVAVQPDCLFVTISQSGETADTLAALRNAKELGFLSSVAICNVATSSLVRESDLTLLTQAGPEIGVASTKAFTTQLVALLLLTLGIGQVQKRLADGVEAELVDELRRLPTRLGEALAMNRTVEKVSELFAEKHHTLFLGRGAQFPVALEGALKLKEISYIHAEAYPAGELKHGPLALVDSDMPVVTVAPNNELVEKLKSNLQEVRARGGELVVFADEGAGIEAGEGTHVVGMPHIGDVLSPILYTIPLQLLSYHVAVLKGTDVDQPRNLAKSVTVE

SEQ ID NO: 12112 - protein, 454 aa, Pseudomonas aeruginosa
MSLEIVILAAGQGTRMRSALPKVLHPIAGKPMLGHVIDCARQLQPERIHVVIGHGADLVRERMAADDLNFVLQAEQLGTGHAVAQALPFLSADQVLILYGDVPLIQLDTLQRLLAQVTPDQLSLLTVDMLDPTGYGRIVRDDQGAVQAIVEHKDATPAQRQIGEINTGILAVPGKRLADWLGRLSNDNAQGEYYLTDVIAMAVGDGLVVASAQPLDAMEVQGVNDRMQQAQLERHYQRLRAEELMRQGVTLLDPQRLDVRGEISVGRDVLIDVNVVLEGRVVIEDDVRIGPNCVIRDSVLRRGAVIKANSHLEGAELGEGSDAGPFARLRPGSVLGARAHVGNFVELKNARLGEGSKAGHLSYLGDAELGANCNIGAGTITCNYDGANKFRTELGDDVFIGSNNSLVAPLKIGDGATTAAGSTITHEVPAKNLAFGRARQKNLENWKRPEKIKK

SEQ ID NO: 12113 - protein, 514 aa, Pseudomonas aeruginosa
MQQLNPSEISEIIKGRIEKLDVASQARNEGTIVSVSDGIVRIYGLADVMYGEMIEFPGGVYGMALNLEQDSVGAVVLGEYQGLAEGMNAKCTGRILEVPVGPELLGRVVDALGNPIDGKGPIDAKATDAVEKVAPGVIWRKSVDQPVQTGYKSVDAMIPVGRGQRELIIGDRQIGKTALAVDAIINQKDSGIKCVYVAIGQKQSTIANVVRKLEENGALANTIVVAASASESAALQYLAPYSGCTMGEYFRDRGEDALIVYDDLSKQAVAYRQISLLLRRPPGREAYPGDVFYLHSRLLERASRVSEEYVEKFTNGAVTGKTGSLTALPIIETQAGDVSAFVPTNVISITDGQIFLESAMFNSGIRPAVNAGISVSRVGGAAQTKIIKKLSGGIRTALAQYRELAAFAQFASDLDEATRKQLEHGQRVTELMKQKQYAPMSIAEMSLSLYAAERGFLQDVEIAKVGSFEQALISYFQREHAALLAKINEKGDFNDEIDAGIKAGIEKFKATQTW

SEQ ID NO: 12114 - protein, 156 aa, Pseudomonas aeruginosa
MNINATLIGQSVAFFIFVLFCMKFVWPPVIAALQERQKKIADGLDAANRAARDLELAHEKAGQQLREAKAQAAEIVEQAKKRANQIVDEARDQARTEGERLKAQAQAEIEQELNSVKDALRAQVGALAVTGAEKILGASIDANAHEQLVSKLAAEI

SEQ ID NO: 12115 - protein, 289 aa, Pseudomonas aeruginosa
MAAETASGYIQHHLQNLTFGRLPNGDWGFAHTAEQAKEMGFWAFHVDTLGWSVLLGVVFLFIFRLAAKKATSGQPGGLQNFVEVMVEFVDTSVKDTFHGRNPLIAPLALTVFVWIFLLNLIDLVPVDYLPMLAAKITGDEHLFFRAVATTDPNATLGLSISVFALIVFYSIKVKGIGGFLGELTLHPFSSKNIVVQILLIPVNFLLEFVTLIAKPVSLALRLFGNMYAGELIFILIAVMFGSGMFLLSALGVALNWAWAVFHILIITLQAFIFMMLTIVYLSMAHEDNH

SEQ ID NO: 12116 - protein, 214 aa, Pseudomonas aeruginosa
MSAVTQHHADELARGADELGVALDADKQRQLLAYLALLIKWNKAYNLTAVRDPDEMVSRHLLDSLSIVPYAEAGDNWLDVGSGGGMPGVPLAILFPEKRLTLLDSNGKKTRFLTQVKLELKLANLEVVHSRVEAFRPESPFDGIVSRAFSSLEDFANWTRHLGGQETRWLAMKGVHPNEELAALPEDFRVEAEHALAVPGCQGQRHLLILRRTA

SEQ ID NO: 12117 - protein, 630 aa, Pseudomonas aeruginosa
MDFPTRFDVIVIGGGHAGTEAALAAARMGVKTLLLTHNVETLGQMSCNPAIGGIGKSHLVKEIDALGGAMAEATDKGGIQFRILNSRKGPAVRATRAQADRVLYKAAIRHTLENQPNLWIFQQACDDLIVEQDQVRGVVTQMGLRFHADNVVLTTGTFLGGLIHIGLENYSGGRAGDPPSIALARRLRELPLRVGRLKTGTPPRIDGRSVDFSVMTEQPGDTPIPVMSFLGSKEQHPEQVSCWITHTNARTHEIIAANLDRSPMYSGVIEGIGPRYCPSIEDKIHRFADKESHQVFLEPEGLTTHELYPNGISTSLPFDVQLQIVRSIRGMENAHIVRPGYAIEYDFFDPRDLRYSLETKVIGGLFFAGQINGTTGYEEAGAQGLLAGANAALRSQGKDSWCPRRDEAYIGVLVDDLITLGTQEPYRMFTSRAEYRLILREDNADLRLTEKGRELGLVDDRRWAAFEAKREGIEREEQRLKSTWVRPNTPQGDAIAERFGTPLTHEYNLLNLLSRPEIDYAGLVEITGNAVDNPQVAEQVEIRTKYAGYIDRQQEEISRLRASEDTRLPVDIDYLGISGLSKEIQNKLNQARPETLGQASRIPGVTPAAISLLLIHLKKRASGRQLEQSA

SEQ ID NO: 12118 - protein, 44 aa, Pseudomonas aeruginosa
MKRTFQPSTLKRARVHGFRARMATKNGRQVLSRRRAKGRKRLTV

SEQ ID NO: 12119 - protein, 64 aa, Staphylococcus aureus
MTNHKLIEAVIKSQLRTDLPSFRPGNTLREHVRIIKGTRERIQVFEGVVIKGRDGGVSKTFICS

SEQ ID NO: 12120 - protein, 80 aa, Staphylococcus aureus
MEEDDIDVKVKDNESKLGGFDWFKRKTNKKDTHENEVESTDEEIYQSEDNHQEHKQNHEHVQDKDKEESKFKKLMKSLFE

SEQ ID NO: 12121 - protein, 333 aa, Staphylococcus aureus
MIRKICKNATICSLAISTAIVAFPETSLAKIKTEITPVVEKAIDSETKMYTRTATTSDTEKNISQSLQFNFLNEPNYDKETLFIKAKGTISSGLEILYPNGYWSSTLRWPGSYSVSIQNVDDNTNTKVTDFAPKNQDETRDVKYTYGYKTGGNFTINQNGLSGNITQEYNYSETISYQQPSYRTLIDKPTSNKAVAWKVEANVIKNMGYDHTRDATTDGNTKVGSEIFTLTRNGNLWARDNFTPKNKMPVTVSEGFNPEFLTVMSHDKKGKGHSLFVVRYKRVMDDFEIRWNYRNIWGYWSGKNNVNKKEESLAALYEIDWKTHSVKLISTFK

SEQ ID NO: 12122 - protein, 319 aa, Staphylococcus aureus
MNRNIVKLVVFMLIFVVAVAGCGQKDTEEKTEMTTIKDELGTEKIKKNPKRVVVLEYSFADYLAALDMKPVGIADDGSSKNITKSVRDKVGAYESVGSRPQPNMEVISKLKPDLIIADVSRHKKIKSELSKIAPTIMLVSGTGDYNANIDAFKTVAKAVGKEKEGEKRLEKHDKILAEIRKKIEQSTLKTAFAFGISRAGMFINNEDTFMGQFLIKMGIQPEVTKDKTTHVGERKGGPYIYLNNEELANINPKVMILATDGKTDKNRTKFIDPAVWKSLKAVKDNKVYDVDRNKWLKSRGIIASESMAEDLEKIAEKAK

SEQ ID NO: 12123 - protein, 246 aa, Staphylococcus aureus; identical to SEQ ID NO: 5461

SEQ ID NO: 12124 - protein, 77 aa, Staphylococcus aureus
MENFNKVKDIIVDRLGVDADKVTEDASFKDDLGADSLDIAELVMELEDEFGTEIPDEEAEKINTVGDAVKFINSLEK

SEQ ID NO: 12125 - protein, 1188 aa, Staphylococcus aureus
MVYLKSIDAIGFKSFADQTNVQFDKGVTAIVGPNGSGKSNITDAIKWVLGEQSAKSLRGSKMEDIIFSGAEHRKAQNYAEVQLRLDNHSKKLSVDENEVIVTRRLYRSGESEYYINNDRARLKDIADLFLDSGLGKEAYSIISQGRVDEILNAKPIDRRQIIEESAGVLKYKKRKAESLNKLDQTEDNLTRVEDILYDLEGRVEPLKEEAAIAKEYKTLSHQMKHSDIVVTVHDIDQYTNDNRQLDQRLNDLQGQQANKEADKQRLSQQIQQYKGKRHQLDNDVESLNYQLVKATEAFEKYTGQLNVLEERKKNQSETNARYEEEQENLIELLENISNEISEAQDTYKSLKSKQKELNAVIRELEEQLYVSDEAHDEKLEEIKNEYYTLMSEQSDVNNDIRFLKHTIEENEAKKSRLDSRLVEVFEQLKDIQGQIKTTKKEYQQTNKELSAVDKEIKNIEKDLTDTKKAQNEYEEKLYQAYRYTEKMKTRIDSLATQEEEYTYFFNGVKHILKAKNKELKGIHGAVAEIIDVPSKLTQAIETALGASLQHVIVDSEKDGRQAIQFLKERNLGRATFLPLNVIQSRVVATDIKSIAKEANGFISIASEAVKVAPEYQNIIGNLLGNTIIVDHLKHANELARAIKYRTRIVTLEGDIVNPGGSMTGGGARKSKSILSQKDELTTMRHQLEDYLRQTESFEQQFKELKIKSDQLSELYFEKSQKHNTLKEQVHHFEMELDRLTTQETQIKNDHEEFEFEKNDGYTSDKSRQTLSEKETHLESIKASLKRLEDEIERYTKLSKEGKESVTKTQQTLHQKQSDLAVVKERIKTQQQTIDRLNNQSQQTKHQLNDVKEKIAFFNSDEVMGEQAFQNIKDQINGQQETRTRLSDELDKLKQQRIELNEQIDAQEAILQVCHQDILAIENHYQDIKAEQSKLDVLIHHAIDHLNDEYQLTVERAKSEYTSDESIDALRKKVKLMKMSIDELGPVNLNAIEQFEELNERYTFLSEQRTDLRKAKETLEQIISEMDQEVTERFKETFHAIQGHFTAVFKQLFGGGDAELQLTEADYLTAGIDIVVQPPGKKLQHLSLLSGGERALTAIALLFAILKVRSAPFVILDEVEAALDEANVIRYAKYLNELSDETQFIVITHRKGTMEFADRLYGVTMQESGVTKLVSVNLNTIDDVLKEEQ

SEQ ID NO: 12126 - protein, 416 aa, Staphylococcus aureus
MSFFKRLKDKFATNKENEEVKSLTEEQGQDKLEDTHSEGSTQDVNDLAENAEVKKKPRKLSEADFDDDGLISIEDFEEIEAQKMGAKFKAGLEKSRQNFQEQLNNLIARYRKVDEDFFEALEEMLITADVGFNTVMTLTEELRMEAQRRNIQDTEDLREVIVEKIVEIYHQEDDNSEAMNLEDGRLNVILMVGVNGVGKTTTIGKLAYRYKMEGKKVMLAAGDTFRAGAIDQLKVWGERVGVDVISQSEGSDPAAVMYDAINAAKNKGVDILICDTAGRLQNKTNLMQELEKVKRVINRAVPDAPHEALLCLDATTGQNALSQARNFKEVTNVTGIVLTKLDGTAKGGIVLAIRNELHIPVKYVGLGEQLDDLQPFNPESYVYGLFADMIEQNEEITTVENDQIVTEEKDDNHGAK

SEQ ID NO: 12127 - protein, 110 aa, Staphylococcus aureus
MGQNDLVKTLRMNYLFDFYQSLLTNKQRNYLELFYLEDYSLSEIADTFNVSRQAVYDNIRRTGDLVEDYEKKLELYQKFEQRREIYDEMKQHLSNPEQIQRYIQQLEDLE

SEQ ID NO: 12128 - protein, 455 aa, Staphylococcus aureus; identical to SEQ ID NO: 5420

SEQ ID NO: 12129 - protein, 62 aa, Staphylococcus aureus
MGKQCFVTGRKASTGNRRSHALNSTKRRWNANLQKVRILVDGKPKKVWVSARALKSGKVTRV

SEQ ID NO: 12130 - protein, 311 aa, Staphylococcus aureus
MNQMSKTAIIFPGQGAQKVGMAQDLYNNNDQATEILTSAANTLDFDILETMFTDEDGKLGETENTQPALLTHSSALLAALKNLNPDFTMGHSLGEYSSLVAADVLSFEDAVKIVRKRGQLMAQAFPTGVGSMAAVLGLDFDKVDEICKSLSSDDKIIEPANINCPGQIVVSGHKALIDELVEKGKSLGAKRVMPLAVSGPFHSSLMKVIEEDFSSYINQFEWHDAKFPVVQNVNAQGETDKEVIKSNMVKQLYSPVQFINSTEWLIDQGVDHFIEIGPGKVLSGLIKKINRDVKLTSIQTLEDVKGWNEND

SEQ ID NO: 12131 - protein, 208 aa, Staphylococcus aureus
MNKMSAFITFEGPEGSGKTTVINEVYHRLVKDYDVIMTREPGGVPTGEEIRKIVLEGNDMDIRTEAMLFAASRREHLVLKVIPALKEGKVVLCDRYIDSSLAYQGYARGIGVEEVRALNEFAINGLYPDLTIYLNVSAEVGRERIIKNSRDQNRLDQEDLKFHEKVIEGYQEIIHNESQRFKSVNADQPLENVVEDTYQTIIKYLEKI

SEQ ID NO: 12132 - protein, 303 aa, Staphylococcus aureus
MNEEVKMLDNKDIATPSRTRALLDKYGFNFKKSLGQNFLIDVNIINNIIDASDIDAQTGVIEIGPGMGSLTEQLARHAKRVLAFEIDQRLIPVLNDTLSPYDNVTVINEDILKANIKKAVENHLQDCEKIMVVANLPYYITTPILLNLMQQDIPIDGYVVMMQKEVGERLNAEVGSKAYGSLSIVVQYYTETSKVLTVPKSVFMPPPNVDSIVVKLMQRTEPLVTVDNEEAFFKLAKAAFAQRRKTINNNYQNYFKDGKQHKEVILQWLEQAGIDPRRRGETLSIQDFAKLYEEKKKFPQLEN

SEQ ID NO: 12133 - protein, 178 aa, Staphylococcus aureus
MKINEFIVVEGRDDTERVKRAVECDTIETNGSAINEQTLEVIRNAQQSRGVIVLTDPDFPGDKIRSTITEHVKGVKHAYIDREKAKNKKGKIGVEHADLIDIKEALMHVSSPFDEAYESIDKSVLIELGLIVGKDARRRREILSRKLRIGHSNGKQLLKKLNAFGYTEADVRQALEDE

SEQ ID NO: 12134 - protein, 257 aa, Staphylococcus aureus
MLIDTHVHLNDEQYDDDLSEVITRAREAGVDRMFVVGFNKSTIERAMKLIDEYDFLYGIIGWHPVDAIDFTEEHLEWIESLAQHPKVIGIGEMGLDYHWDKSPTDVQKEVFRKQIALAKRLKLPIIIHNREATQDCIDILLEEHAEEVGGIMHSFSGSPEIADIVTNKLNFYISLGGPVTFKNAKQPKEVAKHVSMERLLVETDAPYLSPHPYRGKRNEPARVTLVAEQIAELKGLSYEEVCEQTTKNAEKLFNLNS

SEQ ID NO: 12135 - protein, 657 aa, Staphylococcus aureus
MAKETFYITTPIYYPSGNLHIGHAYSTVAGDVIARYKRMQGYDVRYLTGTDEHGQKIQEKAQKAGKTEIEYLDEMIAGIKQLWAKLEISNDDFIRTTEERHKHVVEQVFERLLKQGDIYLGEYEGWYSVPDETYYTESQLVDPQYENGKIIGGKSPDSGHEVELVKEESYFFNISKYTDRLLEFYDQNPDFIQPPSRKNEMINNFIKPGLADLAVSRTSFNWGVHVPSNPKHVVYVWIDALVNYISALGYLSDDESLFNKYWPADIHLMAKEIVRFHSIIWPILLMALDLPLPKKVFAHGWILMKDGKMSKSKGNVVDPNILIDRYGLDATRYYLMRELPFGSDGVFTPEAFVERTNFDLANDLGNLVNRTISMINKYFDGELPAYQGPLHELDEEMEAMALETVKSYTESMESLQFSVALSTIWKFISRTNKYIDETTPWVLAKDDSQKDMLGNVMAHLVENIRYAAVLLRPFLTHAPKEIFEQLNINNPQFMEFSSLAQYGVLTEPIMVTGQPKPIFPRLDSEAEIAYIKESMQPPATEEEKEEIPSKPQIDIKDFDKVEIKAATIIDAEHVKKSDKLLKIQVDLDSEQRQIVSGIAKFYTPDDIIGKKVAVVTNLKPAKLMGQKSEGMILSAEKDGVLTLVSLPSAIPNGAVIK

SEQ ID NO: 12136 - protein, 279 aa, Staphylococcus aureus
MAVLYLVGTPIGNLADITYRAVDVLKRVDMIACEDTRVTSKLCNHYDIPTPLKSYHEHNKDKQTAFIIEQLELGLDVALVSDAGLPLISDPGYELVVAAREANIKVETVPGPNAGLTALMASGLPSYVYTFLGFLPRKEKEKSAVLEQRMYENSTLIIYESPHRVTDTLKTIAKIDATRQVSLGRELTKKFEQIVTDDVTQLQALIQQGDVPLKGEFVILIEGAKANNEISWFDDLSINEHVDHYIQTSQMKPKQAIKKVAEERQLKTNEVYNIYHQIS

SEQ ID NO: 12137 - protein, 202 aa, Staphylococcus aureus; identical to SEQ ID NO: 5305

SEQ ID NO: 12138 - protein, 663 aa, Staphylococcus aureus; identical to SEQ ID NO: 5350

SEQ ID NO: 12139 - protein, 800 aa, Staphylococcus aureus
MSEIIQDLSLEDVLGDRFGRYSKYIIQERALPDVRDGLKPVQRRILYAMYSSGNTHDKNFRKSAKTVGDVIGQYHPHGDSSVYEAMVRLSQDWKLRHVLIEMHGNNGSIDNDPPAAMRYTEAKLSLLAEELLRDINKETVSFIPNYDDTTLEPMVLPSRFPNLLVNGSTGISAGYATDIPPHNLAEVIQATLKYIDNPDITVNQLMKYIKGPDFPTGGIIQGIDGIKKAYESGKGRIIVRSKVEEETLRNGRKQLIITEIPYEVNKSSLVKRIDELRADKKVDGIVEVRDETDRTGLRIAIELKKDVNSESIKNYLYKNSDLQISYNFNMVAISDGRPKLMGIRQIIDSYLNHQIEVVANRTKFELDNAEKRMHIVEGLIKALSILDKVIELIRSSKNKRDAKENLIEVYEFTEEQAEAIVMLQLYRLTNTDIVALEGEHKELEALIKQLRHILDNHDALLNVIKEELNEIKKKFKSERLSLIEAEIEEIKIDKEVMVPSEEVILSMTRHGYIKRTSIRSFNASGVEDIGLKDGDSLLKHQEVNTQDTVLVFTNKGRYLFIPVHKLADIRWKELGQHVSQIVPIEEDEVVINVFNEKDFNTDAFYVFATQNGMIKKSTVPLFKTTRFNKPLIATKVKENDDLISVMRFEKDQLITIITNKGMSLTYNTSELSDTGLRAAGVKSINLKAEDFVVMTEGVSENDTILMATQRGSLKRISFKILQVAKRAQRGITLLKELKKNPHRIVAAHVVTGEHSQYTLYSKSNEEHGLINDIHKSEQYTNGSFIVDTDDFGEVIDMYIS

SEQ ID NO: 12140 - protein, 662 aa, Staphylococcus aureus
MFNEKDQLAVDTLRALSIDTIEKANSGHPGLPMGAAPMAYTLWTRHLNFNPQSKDYFNRDRFVLSAGHGSALLYSLLHVSGSLELEELKQFRQWGSKTPGHPEYRHTDGVEVTTGPLGQGFAMSVGLALAEDHLAGKFNKEGYNVVDHYTYVLASDGDLMEGISHEAASFAGHNKLSKLVVLYDSNDISLDGELNKAFSENTKARFEAYGWNYLLVKDGNDLEEIDNAITTAKSQEGPTIIEVKTTIGFGSPNKAGTNGVHGAPLGEDERKLTFENYGLDPEKRFNVSEEVYEIFQNTMLKRANEDESQWNSLLEKYAETYPELAEEFKLAISGKLPKNYKDELPRFELGHNGASRADSGTVIQAISKTVPSFFGGSADLAGSNKSNVNDATDYSSETPEGKNVWFGVREFAMGAAVNGMAAHGGLHPYGATFFVFSDYLKPALRLSSIMGLNATFIFTHDSIAVGEDGPTHEPIEQLAGLRAIPNMNVIRPADGNETRVAWEVALESESTPTSLVLTRQNLPVLDVPEDVVEEGVRKGAYTVYGSEETPEFLLLASGSEVSLAVEAAKDLEKQGKSVRVVSMPNWNAFEQQSEEYKESVIPSSVTKRVAIEMASPLGWHKYVGTAGKVIAIDGFGASAPGDLVVEKYGFTKENILNQVMSL

SEQ ID NO: 12141 - protein, 1009 aa, Staphylococcus aureus
MKPLHLKLNNFGPFLKEEIDFSKIDNNELFLISGKTGSGKTMIFDAMTYALFGKASTEQREENDLRSHFADGKQPMSVTFEFQLNHRIYKVHRQGPYIKEGNTTKTNAKFDVFEMVDGKYEIRESKVISGTQFIIELLGVNADQFRQLFILPQGEFKRFLISNSREKQGILRTLFDSEKFEAIREILKEEVKKEKAQIENRYQQIDLLWQEIESFDDDKIKGLLEVATQQIDKVIENIPLLQARSKEILAFVNESKETAIKEYEIIEKKTLENNILKDNINQLNKNKIDFVQLKEQQPEIEEIEAKLKLLQDITNLLNYIENREKIETKIAKSKKDISETNNKILNLDCDKRNIDKEKKMLEENGDLIESKISFIDKTRVLFNDINKYQQSYLNIERLRTEDEQLGDELNNLIKGLEKVEDSIGNNESDYEKIIELNNAITNINNEINVIKENEKAKDELDKLLGSKQELENQINEEKTILKNLEIKLDRYDKSKLDLNDKESFISEIKSAVKIGDQCPICGNEIQDLGHHIDFDSIAKRQNEIKEIEANIHTMESNIAVHNSEIKFVNEKISNINIKTQSDLSLEVLNKRLLENENALNNQRDLNKFIEQMKEEKDNLTLQIHNKQLRLNKNESELKICRNLITEFETLSKYNNITNFEVDYKKYIQDVNQHQEHSNQIEDKLIQLSQRKLIEQNNLNHYENQLETYNNDLELNEQSIEMEMSRLNLTDDNDINEIIAWRGEQEELEQKRDTYKKRYHEFEMEIARLESLTKDKELLDSDKLKDDYELKKGKMNTLIDEYSAVHYQCQNNIKKTQSIVSHINYLNQELKDQQEIFQLAEILSGKNNKNLTLENFVLIYYLDQIIAQANLRLATMSDNRYQLIRREAVSHGLSGLEIDVFDLHSNKSRHISSLSGGETFQSSLALALGLSEIVQQQSGGISLESIFIDEGFGTLDQETLETVLDTLLNLKSTGRMVGIISHVSELKNRIPLVLEVKSDQYQSSTRFKRN

SEQ ID NO: 12142 - protein, 94 aa, Staphylococcus aureus
MLKPIGNRVIIEKKEQEQTTKSGIVLTDSAKEKSNEGVIVAVGTGRLLNDGTRVTPEVKEGDRVVFQQYAGTEVKRDNETYLVLNEEDILAVIE

SEQ ID NO: 12143 - protein, 642 aa, Staphylococcus aureus
MILLQLNHISKSFDGEDIFTDVDFEVKTGERIGIVGRNGAGKSTLMKIIAGVENYDSGNVSKIKDLRLGYLTQQMTFNSNATVFEEMSKPFEHIKRMESLIKEETDWLSKHANDYDSDTYKTHMSRYESLSNQFEQLEGYQYESKIKTVLHGLNFSEEDFNKPINDFSGGQKTRLSLAQMLLNEPDLLLLDEPTNHLDLETTKWLEDYLRYFKGAIVIISHDRYFLDKIVTQIYDVALGDVKRYVGNYEEFIQQRDLYYQKRMQEYESQQAEIKRLETFVEKNITRASTSGMAKSRRKILEKMERIDKPMLDAKSANIQFGFDRNTGNDVMHVKNLEIGYQTAITKPISIEVSKGDHIAIIGPNGIGKSTLIKTIANQQKALNGDITFGANLQIGYYDQKQAEFKSSKTILDYVWDQYPLMNEKDIRAVLGRFLFVQDDVKKIINDLSGGEKARLQLALLMLQRDNVLILDEPTNHLDIDSKEMLEQALQHFEGTILFVSHDRYFINQLANKVFDLTIDGGKMYLGDYQYYIEKVEEAEALKAHQEEQSVNVQAHEKSMEQSSYHNQKEQRREQRKLERQISECENEIETLETTILQIDEQLTQPEVYNNPQKANELAIQKQDSEQKLEHAMSKWEELQQKL

SEQ ID NO: 12144 - protein, 397 aa, Staphylococcus aureus
MAHTITIVGLGNYGIDDLPLGIYKFLKTQNKVYARTLDHPVIESLQDELTFQSFDHVYETHDQFEDVYNDIVAQLVEAANEKDIVYAVPGHPRVAETTTVKLLALAKDNTDIDVKVLGGKSFIDDVFEAVNVDPNDGFTLLDATSLQEVTLNVRTHTLITQVYSAMVAANLKITLMERYPDDYPVQIVTGSRSDGADNVVTCPLYELDHDENAFNNLTSVFVPKITTPTYLYHDFDFATEVIDTLVDEDKGCPWDKVQTHETLKRYLLEETFELFEAIDNEDDWHMIEELGDILLQVLLHTSIGKKEGYIDIKEVITSLNAKMIRRHPHIFGDANAETIDDLKEIWSKAKDAEGKQPRVKFEKVFAEHFLNLYEKTKDKSFDEAALKQWLEKGESNT

SEQ ID NO: 12145 - protein, 293 aa, Staphylococcus aureus
MTHDYIVKALAFDGEIRAYAALTTETVQEAQTRHYTWPTASAAMGRTMTATAMMGAMLKGDQKLTVTVDGQGPIGRIIADANAKGEVRAYVDHPQTHFPLNEQGKLDVRRAVGTNGSIMVVKDVGMKDYFSGASPIVSGELGEDFTYYYATSEQTPSSVGLGVLVNPDNTIKAAGGFIIQVMPGAKDETISKLEKAISEMTPVSKLIEQGLTPEGLLNEILGEDHVQILEKMPVQFECNCSHEKFLNAIKGLGEAEIQNMIKEDHGAEAVCHFCGNKYKYTEEELNVLLESLA

SEQ ID NO: 12146 - protein, 313 aa, Staphylococcus aureus
MFLMAQKPVDNITQIIGGTPVVKLRNVVDDNAADVYVKLEYQNPGGSVKDRIALAMIEKAEREGKIKPGDTIVEPTSGNTGIGLAFVCAAKGYKAVFTMPETMSQERRNLLKAYGAELVLTPGSEAMKGAIKKAKELKEEHGYFEPQQFENPANPEVHELTTGPELLQQFEGKTIDAFLAGVGTGGTLSGVGKVLKKEYPNIEIVAIEPEASPVLSGGEPGPHKLQGLGAGFIPGTLNTEIYDSIIKVGNDTAMEMSRRVAKEEGILAGISSGAAIYAAIQKAKELGKGKTVVTVLPSNGERYLSTPLYSFDD

SEQ ID NO: 12147 - protein, 270 aa, Staphylococcus aureus
MVNMTKTKIMGILNVTPDSFSDGGKFNNVESAVTRVKAMMDEGADIIDVGGVSTRPGHEMVSLEEELNRVLPVVEAIVGFDVKISVDTFRSEVAEACLKLGVDIINDQWAGLYDHRMFQIVAKYDAEIILMHNGNGNRDEPVVEEMLTSLLAQAHQAKIAGIPSNKIWLDPGIGFAKTRNEEAEVMARLDELVATEYPVLLATSRKRFTKEMMGYDTTPVERDEVTAATTAYGIMKGVRAVRVHNVELNAKLAKGIDFLKENENARHNLS

SEQ ID NO: 12148 - protein, 139 aa, Staphylococcus aureus
MKYGHILNEFFEQKVEETLIQPTFIYGHPTEISPLAKKNPEDPRFTDRFELFIVGREHANAFTELNDPIDQKGRFEAQLVEKAQGNDEAHEMDEDYIEALEYGMPPTGGLGIGIDRLVMLLTDSPSIRDVLLFPYMRQK

SEQ ID NO: 12149 - protein, 452 aa, Staphylococcus aureus
MFMRRHAIILAAGKGTRMKSKKYKVLHEVAGKPMVEHVLESVKGSGVDQVVTIVGHGAESVKGHLGERSLYSFQEEQLGTAHAVQMAKSHLEDKEGTTIVVCGDTPLITKETLETLIAHHEDANAQATVLSASIQQPYGYGRIVRNASGRLERIVEEKDATHAEKDINEISSGIFAFNNKTLFEKLTQVKNDNAQGEYYLPDVLSLILNDGGIVEVYRTNDVEEIMGVNDRVMLSQAEKAMQRRTNHYHMLNGVTIIDPDSTFIGPDVIIGSDTVIEPGVRINGRTEIGEDVVIGQYSEINNSTIENGACIQQSVVNDASVGANTKVGPFAQLRPGAQLGADVKVGNFVEIKKADLKDGAKVSHLSYIGDAVIGERTNIGCGTITVNYDGENKFKTIVGKDSFVGCNVNLVAPVTIGDDVLVAAGSTITDDVPNDSLAVARARQTTKEGYRK

SEQ ID NO: 12150 - protein, 321 aa, Staphylococcus aureus
MLNNEYKNSSLKIFSLKGNEALAQEVADQVGIELGKCSVKRFSDGEIQINIEESIRGCDVFIIQPTSYPVNLHLMELLIMIDACKRASAATINIVVPYYGYARQDRKARSREPITAKLVANLIETAGATRMIALDLHAPQIQGFFDIPIDHLMGVPILAKHFKDDPNINPEECVVVSPDHGGVTRARKLADILKTPIAIIDKRRPRPNVAEVMNIVGEIEGRTAIIIDDIIDTAGTITLAAQALKDKGAKEVYACCTHPVLSGPAKERIENSAIKELIVTNSIHLDEDRKPSNTKELSVAGLIAQAIIRVYERESVSVLFD

SEQ ID NO: 12151 - protein, 1168 aa, Staphylococcus aureus
MTILTTLIKEDNHFQDLNQVFGQANTLVTGLSPSAKVTMIAEKYAQSNQQLLLITNNLYQADKLETDLLQFVDAEELYKYPVQDIMTEEFSTQSPQLMSERIRTLTALAQGKKGLFIVPLNGLKKWLTPVEMWQNHQMTLRVGEDIDVDQFLYKLVNMGYKRESVVSHIGEFSLRGGIIDIFPLIGEPIRIELFDTEIDSIRDFDVETQRSKDNIEEVDITTASDYIITEEVISHLKEELKSAYENTRPKIDKSVRNDLKETYESFKLFESTYFDHQILRRLVAFMYETPSTIIDYFQKDAIIAVDEFNRIKETEESLTVESDSFISNIIESGNGFIGQSFIKYDDFETLIEGYPVTYFSLFATTMPIKLNHIIKFSCKPVQQFYGQYDIMRSEFQRYVNQNYHIVVLVETETKVERMQAMLSEMHIPSITKLHRSMSSGQAVIIEGSLSEGFELPDMGLVVITERELFKSKQKKQRKRTKAISNAEKIKSYQDLNVGDYIVHVHHGVGRYLGVETLEVGQTHRDYIKLQYKGTDQLFVPVDQMDQVQKYVASEDKTPKLNKLGGSEWKKTKAKVQQSVEDIAEELIDLYKEREMAEGYQYGEDTAEQTTFELDFPYELTPDQAKSIDEIKDDMQKSRPMDRLLCGDVGYGKTEVAVRAAFKAVMEGKQVAFLVPTTILAQQHYETLIERMQDFPVEIQLMSRFRTPKEIKQTKEGLKTGFVDIVVGTHKLLSKDIQYKDLGLLIVDEEQRFGVRHKERIKTLKHNVDVLTLTATPIPRTLHMSMLGVRDLSVIETPPENRFPVQTYVLEQNMSFIKEALERELSRDGQVFYLYNKVQSIYEKREQLQMLMPDANIAVAHGQMSERDLEETMLSFINNEYDILVTTTIIETGVDVPNANTLIIEDADRFGLSQLYQLRGRVGRSSRIGYAYFLHPANKVLTETAEDRLQAIKEFTELGSGFKIAMRDLNIRGAGNLLGKQQHGFIDTVGFDLYSQMLEEAVNEKRGIKEPESEVPEVEVDLNLDAYLPTEYIANEQAKIEIYKKLRKTETFDQIIDIKDELIDRFNDYPVEVARLLDIVEIKVHALHSGITLIKDKGKIIDIHLSVKATENIDGEVLFKATQPLGRTMKVGVQNNAMTITLTKQNQWLDSLKFLVKCIEESMRISDEA

SEQ ID NO: 12152 - protein, 343 aa, Staphylococcus aureus
MEPILEMIKTLTGINSPSGDTEEAIQFVEKYAKDLGYQTTLTNKGALLITVPGKNDEVQRCITAHVDTLGAMVKEIKEDGRLAIELIGGFTYNAIEGEYCQIKTDAGQIYTGTICLHETSVHVYRNNHEIPRDQKHMEIRIDEVTTSEEDTKSLGISVGDFVSFDPRTVITSSGFIKSRHLDDKASVAMILQLLKKLKEEQIILPHTTQFYISNNEEIGYGANASIDSKIKEYIALDMGALGDGQASDEYTVSICAKDASGPYHKQLKSHLVNLCKINNIPYKVDIYPYYGSDASAALHAGADIRHGLFGAGIESSHAMERTHIDSIKATEKLLYAYCLSPIE

SEQ ID NO: 12153 - protein, 335 aa, Staphylococcus aureus
MKTMTLLTRIQTESILLESDIKELIEILISPSIGTDIKYELLSSYSEREIQQQELTYIVRSLINTMYPHQPCYEGAMCVCGTGGDKSNSFNISTTVAFVVASAGVKVIKHGNKSITSNSGSTDLLNQMNIQTTTVDDTPNQLNEKDLVFIGATESYPTMKYMQPVRKMIGKPTILNLVGPLINPYHLTYQMVGVFDPTKLKLVAKTIKDLGRKRAIVLHGANGMDEATLSGDNLIYELTEDGEIKNYTLNATDYGLKHAPNSDFKGGSPEENLTISLNILNGKDQSSRRDVVVLNAGLSLYVAEKVDTIAEGIELASTLIDNGEALKKYHQMRGE

SEQ ID NO: 12154 - protein, 419 aa, Staphylococcus aureus; identical to SEQ ID NO: 5273

SEQ ID NO: 12155 - protein, 327 aa, Staphylococcus aureus
MDKETNDNEYRRQSEHRTSAPKRKKKKKIRKLPIILLIVVILLIALVVYIVHSYNSGVEYAKKHAKDVKVHQFNGPVKNDGKISILVLGADKAQGGQSRTDSIMVVQYDFINKKMKMMSVMRDIYADIPGYGKHKINSAYALGGPELLRKTLDKNLGINPEYYAVVDFTGFEKMIDELMPEGVPINVEKDMSKNIGVSLKKGNHRLNGKELLGYARFRHDPEGDFGRVRRQQQVMQTLKKEMVNFRTVVKLPKVAGILRGYVNTNIPDSGIFQTGLSFGIRGEKDVKSLTVPIKNSYEDVNTNTDGSALQINKNTNKQAIKDFLDED

SEQ ID NO: 12156 - protein, 456 aa, Staphylococcus aureus
MGQTLFDKVWNRHVLYGKLGEPQLLYIDLHLIHEVTSPQAFEGLRLQNRKLRRPDLTFATLDHNVPTIDIFNIKDEIANKQITTLQKNAIDFGVHIFDMGSDEQGIVHMVGPETGLTQPGKTIVCGDSHTATHGAFGAIAFGIGTSEVEHVFATQTLWQTKPKNLKIDINGTLPTGVYAKDIILHLIKTYGVDFGTGYALEFTGETIKNLSMDGRMTICNMAIEGGAKYGIIQPDDITFEYVKGRPFADNFAKSVDKWRELYSDDDAIFDRVIELDVSTLEPQVTWGTNPEMGVNFSEPFPEISDINDQRAYDYMGLEPGQKAEDIDLGYVFLGSCTNARLSDLIEASHIVKGNKVHPNITAIVVPGSRTVKREAEKLGLDTIFKNAGFEWREPGCSMCLGMNPDQVPEGVHCASTSNRNFEGRQGKGARTHLVSPAMAAAAAIHGKFVDVRKVVV

SEQ ID NO: 12157 - protein, 190 aa, Staphylococcus aureus
MAAIKPITTYKGKIVPLFNDNIDTDQIIPKVHLKRISKSGFGPFAFDEWRYLPDGSDNPDFNPNKPQYKGASILITGDNFGCGSSREHAAWALKDYGFHIIIAGSFSDIFYMNCTKNAMLPIVLEKNAREHLAKYVEIEVDLPNQTVSSPDKSFHFEIDETWKNKLVNGLDDIAITLQYESLIEKYEKSL

SEQ ID NO: 12158 - protein, 341 aa, Staphylococcus aureus
MTKDILILAVETSCDETSVSVIKNDRDILSNTVLSQIESHKRFGGVVPEVASRHHVEGITTTINEALVDADVSMEDIDAIAVTEGPGLIGALLIGVNAAKALAFAYDKPLIPVHHIAGHIYANHIEEPLTFPLIALIVSGGHTELVYMKDHLTFEVIGETRDDAVGEAYDKVARTIGLNYPGGPQVDRLAAEGEDTYSFPRVWLDKDSYDFSFSGLKSAVINQLHNQRQKNIPIIEANVATSFQNSVVEVLTFKAIQACKEYGVQRLIVAGGVASNKGLRQSLADQCKVNDIQLTIPSPKLCTDNAAMIGVAGHYLYQQGRFADLGLNGHSNIDLEEYSAE

SEQ ID NO: 12159 - protein, 562 aa, Staphylococcus aureus
MRSDMIKKGDHQAPARSLLHATGALKSPTDMNKPFVAICNSYIDIVPGHVHLRELADIAKEAIREAGAIPFEFNTIGVDDGIAMGHIGMRYSLPSREIIADAAETVINAHWFDGVFYIPNCDKITPGMILAAMRTNVPAIFCSGGPMKAGLSAHGKALTLSSMFEAVGAFKEGSISKEEFLDMEQNACPTCGSCAGMFTANSMNCLMEVLGLALPYNGTALAVSDQRREMIRQAAFKLVENIKNDLKPRDIVTREAIDDAFALDMAMGGSTNTVLHTLAIANEAGIDYDLERINAIAKRTPYLSKIAPSSSYSMHDVHEAGGVPAIINELMKKDGTLHPDRITVTGKTLRENNEGKEIKNFDVIHPLDAPYDAQGGLSILFGNIAPKGAVIKVGGVDPSIKTFTGKAICFNSHDEAVEAIDNRTVRAGHVVVIRYEGPKGGPGMPEMLAPTSSIVGRGLGKDVALITDGRFSGATRGIAVGHISPEAASGGPIALIEDGDEITIDLTNRTLNVNQPEDVLARRRESLTPFKAKVKTGYLARYTALVTSANTGGVMQVPENLI

SEQ ID NO: 12160 - protein, 592 aa, Staphylococcus aureus
MVKMSKTQHEVNQNIDPLKMAESLEPEQLNEKTLNDMRSGSEVLVEALLKENVDYLFGYPGGAVLPLYDTFYDGKIKHILARHEQGAVHAAEGYARVSGKTGVVVVTSGPGATNVMTGITDAHCDSLPLVVFTGQVATPGIGKDAFQEADILSMTSPITKQNYQVKRVEDIPKIVHEAFHVANSGRKGPVVIDFPKDMGVLATNVDLCDEINIPGYEVVTEPENKDIDTFISLLKEAKKPVVLAGAGINQSKSNQLLTQFVNKHQIPTVTTLLGLGAVPYEDTLFLGMGGMHGSYASNMALTECDLLINLGSHFDDRLASKPDAFAPNAKIVHVDIDPSEINKVIHVDLGIIADCKRFLECLNDKNVETVEHSDWVKHCQNNKQKHPFKLGEEDQVFCKPQQTIEYIGKITNGEAIVTTDVGQHQMWAAQFYPFKNHGQWVTSGGLGTMGFGIPSSIGAKLADPDKTVVCFVGDGGFQMTNQEMALLPEYGLDVKIVLINNGTLGMVKQWQDKFFNQRFSHSVFNGQPDFMKMAEAYGVKGFLIDKPEQLEEQLDAAFAYQGPALIEVRISPTEAVNPMVPSGKSNHEMEGL

SEQ ID NO: 12161 - protein, 334 aa, Staphylococcus aureus
MTTVYYDQDVKTDALQGKKIAVVGYGSQGHAHAQNLKDNGYDVVIGIRPGRSFDKAKEDGFDVFPVAEAVKQADVIMVLLPDEIQGDVYKNEIEPNLEKHNALAFAHGFNIHFGVIQPPADVDVFLVAPKGPGHLVRRTFVEGSAVPSLFGIQQDASGQARNIALSYAKGIGATRAGVIETTFKEETETDLFGEQAVLCGGVSKLIQSGFETLVEAGYQPELAYFEVLHEMKLIVDLMYEGGMENVRYSISNTAEFGDYVSGPRVITPDVKENMKAVLTDIQNGNFSNRFIEDNKNGFKEFYKLREEQHGHQIEKVGRELREMMPFIKSKSIEK

SEQ ID NO: 12162 - protein, 1502 aa, Staphylococcus aureus
MCIMHNEKLIKGLYDYREEHDACGIGFYANMDNKRSHDIIDKSLEMLRRLDHRGGVGADGITGDGAGIMTEIPFAFFKQHVTDFDIPGEGEYAVGLFFSKERVLGSEHEAVFKKYFEGEGLSILGYRNVPVNKDAIAKHVADTMPVIQQVFIDIRDIEDVEKRLFLARKQLEFYSTQCDLELYFTSLSRKTIVYKGWLRSDQIKKLYTDLSDDLYQSKLGLVHSRFSTNTFPSWKRAHPNRMLMHNGEINTIKGNVNWMRARQHKLIETLFGEDQHKVFQIVDEDGSDSAIVDNALEFLSLAMEPEKAAMLLIPEPWLYNEANDANVRAFYEFYSYLMEPWDGPTMISFCNGDKLGALTDRNGLRPGRYTITKDNFIVFSSEVGVVDVPESNVAFKGQLNPGKLLLVDFKQNKVIENNDLKGAIAGELPYKAWIDNHKVDFDFENIQYQDSQWKDETLFKLQRQFAYTKEEIHKYIQELVEGKKDPIGAMGYDAPIAVLNERPESLFNYFKQLFAQVTNPPIDAYREKIVTSELSYLGGEGNLLAPDETVLDRIQLKRPVLNESHLAAIDQEHFKLTYLSTVYEGDLEDALEALGREAVDAVKQGAQILVLDDSGLVDGNGFAMPMLLAISHVHQLLIKADLRMSTSLVAKSGETREVHHVACLLAYGANAIVPYLAQRTVEQLTLTEGLQGTVVDNVKTYTDVLSEGVIKVMAKMGISTVQSYQGAQIFEAIGLSHDVIDRYFTGTQSKLSGISIDQIDAENKARQQSDDNYLASGSTFQWRQQGQHHAFNPESIFLLQHACKENDYAQFKAYSEAVNKNRTDHIRHLLEFKACTPIDIDQVEPVSDIVKRFNTGAMSYGSISAEAHETLAQAMNQLGGKSNSGEGGEDAKRYEVQVDGSNKVSAIKQVASGRFGVTSDYLQHAKEIQIKVAQGAKPGEGGQLPGTKVYPWIAKTRGSTPGIGLISPPPHHDIYSIEDLAQLIHDLKNANKDADIAVKLVSKTGVGTIASGVAKAFADKIVISGYDGGTGASPKTSIQHAGVPWEIGLAETHQTLKLNDLRSRVKLETDGKLLTGKDVAYACALGAEEFGFATAPLVVLGCIMMRVCHKDTCPVGVATQNKDLRALYRGKAHHVVNFMHFIAQELREILASLGLKRVEDLVGRTDLLQRSSTLKANSKAASIDVEKLLCPFDGPNTKEIQQNHNLEHGFDLTNLYEITKPYIAKGRRYTGSFTVNNEQRDVGVITGSEISKQYGEAGLPENTINVYTNGHAGQSLAAYAPKGLMIHHTGDANDYVGKGLSGGTVIVKAPFEERQNEIIAGNVSFYGATGGKAFINGSAGERFCIRNSGVDVVVEGIGDHGLEYMTGGHVINLGDVGKNFGQGMSGGIAYVIPSDVEAFVENNQLDTLSFTKIKHQEEKAFIKQMLEEHVSHTNSTRAIHVLKHFDRIEDVVVKVIPKDYQLMMQKIHLHKSLHDNEDEAMLAAFYDDSKTIDAKHKPAVVY

SEQ ID NO: 12163 - protein, 487 aa, Staphylococcus aureus
MGEFKGFMKYDKQYLGELSLVDRLKHHKAYQQRFTKEDASIQGARCMDCGTPFCQTGQQYGRETIGCPIGNYIPEWNDLVYHQDFKTAYERLSETNNFPDFTGRVCPAPCESACVMKINRESIAIKGIERTIIDEAFENGWVAPKVPSRRRDEKVAIVGSGPAGLTAAEELNLLGYQVTIYERARESGGLLMYGIPNMKLDKDVVRRRIKLMEEAGITFINGVEVGVDIDKATLESEYDAIILCTGAQKGRDLPLEGRMGDGIHFAMDYLTEQTQLLNGEIDDITITAKDKNVIIIGAGDTGADCVATALRENCKSIVQFNKYTKLPEAITFTENASWPLAMPVFKMDYAHQEYEAKFGKEPRAYGVQTMRYDVDDKGHIRGLYTQILEQGENGMVMKEGPERFWPADLVLLSIGFEGTEPTVPNAFNIKTDRNRIVADDTNYQTNNEKVFAAGDARRGQSLVVWAIKEGRGVAKAVDQYLASKVCV

SEQ ID NO: 12164 - protein, 242 aa, Staphylococcus aureus
MVKQKKFMKIYEALKEDILNGQIQYGEQIPSEHDLVQLYQSSRETVRKALDLLALDGMIQKIHGKGSLVIYQEVTEFPFSELVSFKEIQEEMGVAYLTEVVVNEVVEAHEVPEVQHALNINSSESLIHIVRTRRLNQHVKIVDEDYFLKSIVSDIGNDVASDSIYDYLEKVLNLNISYSSKSITFEPFDEQAYQLFGDVSVAYSATVRSIVYLENTMPFQYNISKHLANEFKFNDFSRRRTK

SEQ ID NO: 12165 - protein, 557 aa, Staphylococcus aureus
MYRPQSFEDVVGQEHVTKTLRNAISKEKQSHAYIFSGPRGTGKTSIAKVFAKAINCLNSTDGEPCNECHICKGITQGTNSDVIEIDAASNNGVDEIRNIRDKVKYAPSESKYKVYIIDEVHMLTTGAFNALLKTLEEPPAHAIFILATTEPHKIPPTIISRAQRFDFKAISLDQIVERLKFVADAQQIECEDEALAFIAKASEGGMRDALSIMDQAIAFGDGTLTLQDALNVTGSVHDEALDHLFDDIVQGDVQASFKKYHQFITEGKEVNRLINDMIYFVRDTIMNKTSEKDTEYRALMNLELDMLYQMIDLINDTLVSIRFSVNQNVHFEVLLVKLAEQIKGQPQVIANVAEPAQIASSPNTDVLLQRMEQLEQELKTLKAQGVSVAPTQKSSKKPARGIQKSKNAFSMQQIAKVLDKANKADIKLLKDHWQEVIDHAKNNDKKSLVSLLQNSEPVAASEDHVLVKFEEEIHCEIVNKDDEKRSSIESVVCNIVNKNVKVVGVPSDQWQRVRTEYLQNRKNEGDDMPKQQVQQTDIAQKAKDLFGEETVHVIDEE

SEQ ID NO: 12166 - protein, 105 aa, Staphylococcus aureus; identical to SEQ ID NO: 5465

SEQ ID NO: 12167 - protein, 198 aa, Staphylococcus aureus; identical to SEQ ID NO: 5466

SEQ ID NO: 12168 - protein, 219 aa, Staphylococcus aureus
MFGSDLDSAQLLQALYETLYMVSIALFLGAVIGIPLGVLLVITRKQGIWPNIVIHQVLNPLINILRSLPFIILLIAIVPFTKLVVGTSIGTTAAIVPLTVYVAPYIARLVENSLLEVDEGIIEAAKAMGASPLQIIRYFLIPEALGSLVLAITTAIIGLIGSTAMAGAVGGGGIGDLALVYGYQRFDTTVIIITVIVLVIIVQVIQTLGNVLARFIRRH

SEQ ID NO: 12169 - protein, 134 aa, Staphylococcus aureus
MSKMIKCVCLVEETADKILLVQVRNREKYYFPGGKIEEGESQVHALLREVKEELNLTLTMDEIEYIGTIVGPAYPQQDMLTELNGFRALTKIDWENVTINNEITDIRWIDKDNDALIAPAVKVWIETYGGKHDK

SEQ ID NO: 12170 - protein, 281 aa, Staphylococcus aureus
MKSEDVIVKEKHIKWDKIFYGDDWVNNVVETIRTKDILQSVYLKRYLLRAMMAGFIIGIITVFVLSVKATHEPDLPPGIVNMASAITFSFALVLILFTNSELLTSNFMYFTVGLYYKVIKPTRVLKIFLLCFAGNILGAAILFSFMRFSNVMTPDMLNQLSAVIEHKTLSTGFVSILMKAIFANFFINISLVIAMQIDDVLAKMFVMMFGVTIFAFMGYEHVVYNSCLFMGGLIYQVDTLHFIPAISNIAAAFIGNYIGGGLIIGLFYAYLNDHHQFYKNN

SEQ ID NO: 12171 - protein, 425 aa, Staphylococcus aureus
MLFSLFFGAGNLIFPPMLGHTAGQNMWIGMLGFALTGILLPFITVIVVAFYDEGVESVGNRIHPWFGFIFAVVIYMSIGAFYGIPRAANVAYEIGTRHILPVHNQWTLIIFAAVFFAIVYWISLNPSKIVDNLGKLLTPLLLLMVALLSIAVIFNPESALSAPKDKYITHPFISGSLEGYFTMDLVAALAFSVVIVNGYKFKGLTDRTKILKYVCFSGFIAAILLGMIYFALAYVGASTAPGNFKDGTDILTYNSLRVFGSFGNLVFGMTVILACLTTCIGLVNACATFTKKHVPKFSYKIFALVFSIIGFLFTTLGLEMILKIAVPLLTLIYPVSIALVLISFANMFSTFRFSWAYRLATVITLIISILQILNSFNLLHGVILKWFMMLPLADIDLAWLVPFILLAIIGFIIDVVIRRPKQATT

SEQ ID NO: 12172 - protein, 307 aa, Staphylococcus aureus
MANLQKYIEYSREVQQARENNQPIVALESTIISHGMPYPQNVEMATTVEQIIRNNGAIPATIAIIEGKIKIGLESEDLEILATNKDVAKVSRRDLAEIVAMKRIGATTVATTMICAAMAGIQFFVTGGIGGVHKGAEHTMDISADLEELSKTNVTVICAGAKSILDLPKTMEYLETKGVPVIGYQTNELPAFFTRESGVKLTSSVETPERLADIHLTKQQLNLEGGIVVANPIPYEHALSKAYIEAIINEAVVEAENQGIKGKDATPFLLGKIVEKTNGKSLAANIKLVENNAALGAKIAVAVNKLM

SEQ ID NO: 12173 - protein, 300 aa, Staphylococcus aureus
MKIFFKINRNGVSKVYYIAIDIGGTQIKSAVIDKQLNMFDYQQIPTPDNKSELITDKVYEIVTGYMKQYQLIQPVIGISSAGVVDEQKGEIVYAGPTIPNYKGTNFKRLLKSLSPYVKVKNDVNAALLGELKLHQYQAERIFCMTLGTGIGGAYKNNQGHIDNGELHKANEVGYLLYRPTENTTFEQRAATSALKKRMIDGGFTRSTHVPVLFEAAEEGDDIAKQILNEWAEDVAEGIAQIQVMYDPGLILIGGGISEQGDNLIKYIEPKVAHYLPKDYVYAPIQTTKSKNDAALYGCLQ

SEQ ID NO: 12174 - protein, 266 aa, Staphylococcus aureus
MKFENRVQRYQHLFTKTDKRIVNYIRQNGYSDAFSTINSLAHAIGTSPATMTRFSHKLDYENFQDLKFNIQQEMTETVIENSPIIQRIHKYHQQIIQQTGEFIDNDIIQTFIDKLQSSRHILFAGLGSSGLSATEFYYRMIRMGLKGNVTTDSHLMKISASLLSHSDMFIAMSNSGNTSELISAAEVAKSHGAYVVAITNFEGSKLTDCADLVLLTTDQSRNTDHQFINTQIATLFLIDIVSYHLLENTNLSQTYQHTKSIILDNK

SEQ ID NO: 12175 - protein, 461 aa, Staphylococcus aureus
MIHLIKGKMHHTVLCIHLNKGVALMNQYHSNAQQPSAWRFFVYSLVGILCFFIPFTINGNNTIFVDHVHLAIRSIIGPLMPYVALIMILIGTALPIVRRTFMTSITNLVITLFKVAGAIIGIMYVFKIGPSILFKANYGPFLFEKLMMPLSILIPVGAIALSLLVGYGLLEFVGVYMEPIMRPIFKTPGKSAVDAVASFVGSYSLGLLITNRVYKQGMYNKREATIIATGFSTVSATFMIIVAKTLGLMPHWNLYFWITLVITFVVTAITAWLPPITNESTEYYNGQEGEQEVAIEGSRLKTAYAEAMKQNALTPSLVKNVWDNLKDGLEMTVGILPSILSIGFLGLIVANYTPFIDWLGYIFYPFIYIFPIADQAVLAKASAISIVEMFLPSLLVTKAAMSTKFVVGVVSVSAIIFFSALVPCILATEIKIPVWKLIIIWFLRVALSLLITIPVALLIFG

SEQ ID NO: 12176 - protein, 203 aa, Staphylococcus aureus
MAKEIAKSLLDIEAVTLSPNDLYTWSSGIKSPIYCDNRVTLGYPLVRGAIRDGLINLIKEHFPGVEVISGTATAGIPHAAFIAEKLKLPMNYVRSSNKSHGKQNQIEGAKSEGKKVVVIEDLISTGGSSVTAVEALKQAGAEVLGVVAIFTYGLKKADDTFSNIQLPFYTLSDYNELIEVAENEGKISSEDIQTLVEWRDNLA

SEQ ID NO: 12177 - protein, 565 aa, Staphylococcus aureus; identical to SEQ ID NO: 5605

SEQ ID NO: 12178 - protein, 187 aa, Staphylococcus aureus
MSHLALKDLFSGFFVIDDEEEVEVPDKQQQVNEAPAKEQSQQTTKQNAIKSVPQKSASRYTTTSEERNNRMSNYSKNNSRNVVTMNNATPNNASQESSKMCLFEPRVFSDTQDIADELKNRRATLVNLQRIDKVSAKRIIDFLSGTVYAIGGDIQRVGTDIFLCTPDNVEVAGSITDHIENMEHSFD

SEQ ID NO: 12179 - protein, 664 aa, Staphylococcus aureus
MIGKIINERYKIVDKLGGGGMSTVYLAEDTILNIKVAIKAIFIPPREKEETLKRFEREVHNSSQLSHQNIVSMIDVDEEDDCYYLVMEYIEGPTLSEYIESHGPLSVDTAINFTNQILDGIKHAHDMRIVHRDIKPQNILIDSNKTLKIFDFGIAKALSETSLTQTNHVLGTVQYFSPEQAKGEATDECTDIYSIGIVLYEMLVGEPPFNGETAVSIAIKHIQDSVPNVTTDVRKDIPQSLSNVILRATEKDKANRYKTIQEMKDDLSSVLHENRANEDVYELDKMKTIAVPLKKEDLAKHISEHKSNQPKRETTQVPIVNGPAHHQQFQKPEGMLYEPKPKKKSTRKIVLLSLIFSLLMIALVSFVAMAMFGNKYEETPDVIGKSVKEAEQIFNKNNLKLGKISRSYSDKYPENEIIKTTPNTGERVERGDSVDVVISKGPEKVKMPNVIGLPKEQALQKLKSLGLKDVKIEKVYNNQAPKGYIANQSVTANTEIAIHDSNIKLYESLGIKQVYVEDFEHKSFSKAKKALEEKGFKVESKEEYSDDIDEGDVISQSPKGKSVDEGSTISFVVSKGEKSDSSDVKTTTESVDVPYTGKNDKSQKVKVYIKDKDNDGSTEKGSFDITSDQRIDIPLRIEKGKTASYIVKVDGKTVAEKEVSYDDI

SEQ ID NO: 12180 - protein, 205 aa, Staphylococcus aureus; identical to SEQ ID NO: 5602

SEQ ID NO: 12181 - protein, 920 aa, Staphylococcus aureus
MKKMDYKETLLMPKTDFPMRGGLPNKEPQIQEKWDAEDQYHKALEKNKGNETFILHDGPPYANGNLHMGHALNKILKDFIVRYKTMQGFYAPYVPGWDTHGLPIEQALTKKGVDRKKMSTAEFREKCKEFALEQIELQKKDFRRLGVRGDFNDPYITLKPEYEAAQIRIFGEMADKGLIYKGKKPVYWSPSSESSLAEAEIEYHDKRSASIYVAFDVKDDKGVVDADAKFIIWTTTPWTIPSNVAITVHPELKYGQYNVNGEKYIIAEALSDAVAEALDWDKASIKLEKEYTGKELEYVVAQHPFLDRESLVINGDHVTTDAGTGCVHTAPGHGEDDYIVGQKYELPVISPIDDKGVFTEEGGQFEGMFYDKANKAVTDLLTEKGALLKLDFITHSYPHDWRTKKPVIFRATPQWFASISKVRQDILDAIENTNFKVNWGKTRIYNMVRDRGEWVISRQRVWGVPLPVFYAENGEIIMTKETVNHVADLFAEHGSNIWFEREAIDLLPEGFTHPGSPNGTFTKETDIMDVWFDSGSSHRGVLETRPELSFPADMYLEGSDQYRGWFNSSITTSVATRGVSPYKFLLSHGFVMDGEGKKMSKSLGNVIVPDQVVKQKGADIARLWVSSTDYLADVRISDEILKQTSDVYRKIRNTLRFMLGNINDFNPDTDSIPESELLEVDRYLLNRLREFTASTINNYENFDYLNIYQEVQNFINVELSNFYLDYGKDILYIEQRDSHIRRSMQTVLYQILVDMTKLLAPILVHTAEEVWSHTPHVKEESVHLADMPKVVEVDQALLDKWRTFMNLRDDVNRALETARNEKVIGKSLEAKVTIASNDKFNASEFLTSFDALHQLFIVSQVKVVDKLDDQATAYEHGDIVIEHADGEKCERCWNYSEDLGAVDELTHLCPRCQQVVKSLV

SEQ ID NO: 12182 - protein, 305 aa, Staphylococcus aureus
METYEFNITDKEQTGMRVDKLLPELNSDWSRNQIQDWIKAGLVVANDKVVKSNYKVKLNDHIVVTEKEVVEADILPENLNLDIYYEDDDVAVVYKPKGMVVHPSPGHYTNTLVNGLMYQIKDLSGINGEIRPGIVHRIDMDTSGLLMVAKNDIAHRGLVEQLMDKSVKRKYIALVHGNIPHDYGTIDAPIGRNKNDRQSMAVVDDGKEAVTHFNVLEHFKDYTLVECQLETGRTHQIRVHMKYIGFPLVGDPKYGPKKTLDIGGQALHAGLIGFEHPVTGEYIERHAEIPQDFEDLLDTIRKRDA

SEQ ID NO: 12183 - protein, 204 aa, Staphylococcus aureus
MANPIKIGIGGPVGAGKTQLIEKVVKRLSKEMSIGVITNDIYTKEDEKILVNSGVLPESRIIGVETGGCPHTAIREDASMNFAAIDELLERHDDIELIFIESGGDNLAATFSPELVDFSIYIIDVAQGEKIPRKGGQGMIKSDFFVINKTDLAPYVGASLEQMAEDTKVFRGKRPFTFTNLKTDEGLDEVIDWIERDTLLKGLS

SEQ ID NO: 12184 - protein, 136 aa, Staphylococcus aureus
MIPGEIITKSTEVEINNHHPETVIEVENTGDRPIQVGSHFHFYEANAALDFEREMAYGKHLDIPAGAAVRFEPGDKKEVQLVEYAGKRKIFGFRGMVNGPIDESRVYRPTDENDEYAGVFGDNGDENVNKKGGKRS

SEQ ID NO: 12185 - protein, 89 aa, Staphylococcus aureus
MIVVAAEVARRRKARGLKLNHPEALALISDELLEGARDGKTVAELMSYGRQILNKEDVMDGVEHMITDIEIEATFPDGTKLITVHHPIV

SEQ ID NO: 12186 - protein, 168 aa, Staphylococcus aureus
MGEHQNVKLNRTVKAAVLTVSDTRDFDTDKGGQCVRQLLQADDVEVSDAHYTIVKDEKVAITTQVKKWLEEDIDVIITTGGTGIAQRDVTIEAVKPLLTKEIEGFGELFRYLSYVEDVGTRALLSRAVAGTVNDKLIFSIPGSTGAVKLALEKLIKPELNHLIHELTK

SEQ ID NO: 12187 - protein, 419 aa, Staphylococcus aureus; identical to SEQ ID NO: 5581

SEQ ID NO: 12188 - protein, 421 aa, Staphylococcus aureus; identical to SEQ ID NO: 5329

SEQ ID NO: 12189 - protein, 1055 aa, Staphylococcus aureus
MIKKLLQFSLGNKFAIFLMVVLVVLGGVYASAKLKLELLPNVQNPVISVTTTMPGATPQSTQDEISSKIDNQVRSLAYVKNVKTQSIQNASIVTVEYENNTDMDKAEEQLKKEIDKIKFKDEVGQPELRRNSMDAFPVLAYSFSNKENDLKKVTKVLNEQLIPKLQTVDGVQNAQLNGQTNREITLKFKQNELEKYGLTADDVENYLKTATRTTPLGLFQFGDKDKSIVVDGQYQSVDAFKNINIPLTLAGGQGQSQSQSDNKQNSAMSDVNQASPQQNSKASASNNISGMPTAKLGDLADITVGDVRTSISKTNGKDAVNLQITKAQDANTVQVAKDVQRKIDTFVDENKDFNVTKTMDTAKPVEKSLYTMVEKASLGTIVAIIVILLFLRNIRTTAISIISIPLSLLMALIALKLSDVSLNILTLGALTVAIGRVIDDSIVVVENIYRRLTDSEEQLKGENLIISATTEVFKPIMSSTLVTIIVFLPLVFVSGSVGEMFRPFALAIAFSLLASLLVSITLVPALAATLFKKGVKRRNKQHQEGLGVVSTTYKKVLHWSLNHKWIVIILSTLILVATIVFGGPRLGTSFISAGDDKFLAITYTPKPGETEQAVLNHAQDVEKYLKQKKHVKTIQYSVGGSSPVDPTGSTNSMAIMVEYDNDTPNFDVEADKVIKHADGFKHPGEWKNQDLGTGAGNKSVEVTVKGPSMDAIKSTVKDIEQKMKQVKGLANVKSDLSQTYDQYEIKVDQNKAAENGISASQLVMHLNENLPEKTVTTVKENGKTVGVKVKQNKQTDWSEDKLNNITLKKPTGGTIKLGDIATLVKTTTPSKLTQEQGDYATTVSAKVTNKDVGGTTRQVMSKINNLDKPNNVKVNIGGASDDINNAMTQLAFAMLAAIIIVYLILVITFKGGLAPFTILFSLPFTVIGVIIALLITGETISVPSLIGMLMLIGIVVTNAIVLIDRVINNEQQGMEMKEALIEAGGTRIRPILMTAIATIGALVPLLFGQDSSILISKGLAATVIGGLISSTLLTLVVVPVIYEILFTLKKRFTKR

SEQ ID NO: 12190 - protein, 711 aa, Staphylococcus aureus
MKSLILAEKPSVARDIADALQINQKRNGYFENNQYIVTWALGHLVTNATPEQYDKNLKEWRLEDLPIIPKYMKTVVIGKTSKQFKTVKALILDNKVKDIIIATDAGREGELVARLILDKVGNKKPLRRLWISSVTKKAIQQGFKNLKDGRQYNDLYYAALARSEVDWIVGINATRALTTKYDAQLSLGRVQTPTIQLVNTRQQEINQFKPQQYYTLSLTVKGFDFQLESNQRYTNKETLEQIVNNLKNVDGKIKSVATKHKKSYPQSLYNLTDLQQDMYRRYKIGPKETLNTLQSLYERHKVVTYPRTDSNYLTTDMVDTMKERIQATMATTYKDQARPLISKTFSSKMSIFNNQKVSDHHAIIPTEVRPVMSDLSNRELKLYDMIVERFLETLMPPHEYDAITVTLEVAGHTFVLKENVTTVLGFKSIRQGESITEMQQPFSEGDEVKISKTNIREHETTPPEYFNEGSLLKAMENPQNFIQLKDKKYAQTLKQTGGIGTVATRADIIDKLFNMNAIESRDGKIKVTSKGKQILELAPEELTSPLLTAQWEEKLLLIERGKYQAKTFINEMKDFTKDVVNGIKNSDRKYKHDNLTTTECPTCGKFMIKVKTKNGQMLVCQDPSCKTKKNVQRKTNARCPNCKKKLTLFGKGKEAVYRCVCGHSETQAHMDQRMKSKSSGKVSRKEMKKYMNKNEGLDNNPFKDALKNLNL

SEQ ID NO: 12191 - protein, 318 aa, Staphylococcus aureus
MVGLKRSSKSKMSLPKKIFLWVFGILVILAIVAVVYVAAKIFITGNKIHNPLDRNHSELRDKKVSLNDGDPFTIALFGVDSDADRKKKGGGERSDSIMILSINPKTKKTEIVSIPRDTRAEIVGRGTTEKIAHAYAYGGPNMAVKSLEKLMNVPIDHYATIDMDGLHNMIDSIGGVDVVSNDTFTVDGVRFTKGQQTHVNGDQALKFIRSRKEEGAGGDFGRQQRQQIVLEAMANKIASPSSITHFNSLMNEIQNNVKTDLTLGDLNTIRSNYKDANDTINKHQLSGQGGIQSDGLYYFIPSEQSKAESTKLLKDNLE

SEQ ID NO: 12192 - protein, 987 aa, Staphylococcus aureus
MNSMQEHLVVTLDGKDYLVEPDTNLLEFIKSQDTFVPSICYNESMGPIQTCDTCTVEIDGKIERSCSTVIDRPMTVNTVNNDVKDAQKEALDRILEKHMLYCTVCDYNNGDCEIHNTMDAWGLQHQTYEYKEKPYEKDYGPFYRYDPNQCILCGRCVEACQDIEVNETIRIDWDREHPRVIWDNDVPINESSCVSCGQCATVCPCNAMMEVNMEGNAGYMTDTEPGSLAAMIDLTKKAEPGYGPLFAISDSEAEMRKERIKKTKTVCTYCGVGCSFEVWTKDREILKVQPSHDSPANKIATCVKGKFSWGHINSDQRLTKPLVRKNGEFHEVEWDEALNVIADNFTSIKEKYGPDALSFISSSKATNEESYLMQKLARQVIGTNNVDNCSRYCQAPATKGLFRTVGHGGDSGSIEDLEKAAMSVLIGTNTAEAHPVIASRMKRAQKLFGQKIHVFDIRKHEMAERADRFYQPKPGTDLAWLSAVTKYIIDHDLHDKAFIEEWVEDFDEYYKSLETFTMAFAEEATGIPEAELIKFAEECAKAESVVICWAMGITQQDIGSDSSTAISNLLLVTGNYRRPGTGAYPLRGHNNVQGCSDMGSMPDKITGYQSIEADDIRAKFEKEYGVKLNPKVGKDNHEMVEGVHDGEIHSLYLYGEDTGIVDSNINFVQAAFEKLDFMVVQDEFLTFTATFADVVLPASPSLEKDGTFTNTERRIQRLYQALKPLGDSKPDWKIFQAIANKLGFDWNYKHPSEIMDEIARLTPLYAGVSYERLEGFNSLQWPLHPDGTDEPILYLEGFNFDNGKAKLFPLSFDNYFKQDEVYDIHVNNGRLLEHFHEGNMTYQTPMIKYKVPRAFVEISPELAEDRGIHEGAEVKLISETGEAVLQVHVTDRVKGKEIYIPLNNDAMENGDLGAINLLTNSDVDQYTDTPSYKRTSCRLEVITKRGKSPLNPNNFRVNKKRHPQYSVQVQKKWERPDYVFPGNQVDK

SEQ ID NO: 12193 - protein, 511 aa, Staphylococcus aureus
MSYFSNVPLFILKRGTVFVMTTQHSKTDVILIGGGIMSATLGTLLKELSPEKNIKVFEKLAQPGEESSNVWNNAGTGHSALCELNYTKEGKDGTVDCSKAIKINEQYQISKQFWAYLVKTGQLDNPDRFIQAVPHMSFVIGEDNVAFIKSRVATLKKSVLFEKMKLSQDEEEMKSWVPLMIEGRKFDEPIALTYDETGTDVNFGALTAKLFDNLEQRGVGIQYKQNVLDIKKQKSGAWLVKVKDLETNETTTYESDFVFIGAGGASLPLLQKTGIKQSKHIGGFPVSGLFLRCTNQEVIDRHHAKVYGKAAVGAPPMSVPHLDTRFVDGKRSLLFGPFAGFSPKFLKTGSHMDLIKSVKPNNIVTMLSAGIKEMSLTKYLVSQLMLSNDERMDDLRVFFPNAKNEDWEVITAGQRVQVIKDTEDSKGNLQFGTEVITSDDGTLAALLGASPGASTAVDIMFDVLQRCYRDEFKGWEPKIKEMVPSFGYRLTDHEDLYHKINEEVTKYLQVK

SEQ ID NO: 12194 - protein, 351 aa, Staphylococcus aureus
MKLAIKEIMFYKFRYILITLIILLLSIMVLFISGLAQGLGRENISLFEHFDNDEYVVQKMKEPQIEKSQLSDTQQNQIKKVIHQEPHKMNVQTLKLSNKEQDVITMNDVKQQRLQLKKGDYPKNAHEVAINDKLAADNIRVGDRLHFKNNSTSYRVSGILNDTMYAHSSIVLLNDNGFNALNKVNTAFYPVKNLTQQQRDALNKINDVQVVSEKDLTGNIASYQAEQAPLNMMIVSLFAITAIVLSAFFYVMTIQKISQIGILKAIGIKTRHLLSALVLQILTLTIIGVGIAVIIIVGLSFMMPVTMPFYLTTQNILLMVGIFILVAILGASLSFIKLFKVDPIEAIGGAE

SEQ ID NO: 12195 - protein, 221 aa, Staphylococcus aureus
MALVVEDIVKNFGEGLSETKVLKGINFEMEQGEFVILNGASGSGKTTLLTILGGLLSQTSGTVLYNDAPLFDKQHRPSDLRLEDIGFIFQSSHLVPYLKVIEQLTLVGQEAGMTKQQSSKRAIQLLKNIGLEDRLNVYPHQLSGGEKQRVAIMRAFMNNPKIILADEPTASLDADRATKVVEMIRQQIKEQQMIGIMITHDRRLFEYADRVIELEDGKITD

SEQ ID NO: 12196 - protein, 349 aa, Staphylococcus aureus
MSDFQREQRKNEHVEIAMAQSDAMHSDFDKMRFVHHSIPSINVNDIDLTSQTPDLTMAYPVYINAMTGGSEWTKNINEKLAVVARETGLAMAVGSTHAALRNPRMAETFTIARKMNPEGMIFSNVGADVPVEKALEAVELLEAQALQIHVNSPQELVMPEGNREFVTWLDNIASIVSRVSVPVIIKEVGFGMSKELMHDLQQIGVKYVDVSGKGGTNFVDIENERRANKDMDYLSSWGQSTVESLLETTAYQSEISVFASGGLRTPLDAIKSLALGAKATGMSRPFLNQVENNGIAHTVAYVESFIEHMKSIMTMLDAKNIDDLTQKQIVFSPEILSWIEQRSLNIHRG

SEQ ID NO: 12197 - protein, 299 aa, Staphylococcus aureus
MGLVIEHVTKRFGKMTAVNDISLELESGKMLGFLGRNGAGKTTTFRMILGLSEPTEGHITYNGKKLDKTMYNRIGYLPEERGLHGKLTVEEELKYLATLKGMSKTEIQQQISYWLERFDITENRKKRIDSLSKGNQQKIQLLASMLHKPELLILDEPFSGLDPVNVELLKEAVKDLNDWGSTIVYSSHRMEHVEELCDDVCILDKGQLVVSGDINHVRASNGNKKVVIESETTLPDLTHIRGIIHSENMKQGIQLTIENEDVAKDIYQVVAHQGYVKRFQVVEPSLQDIFIEKVGGKDA

SEQ ID NO: 12198 - protein, 553 aa, Staphylococcus aureus
MRKIQAKKGLSIECKGWEQEAVLRMLYNNLDPEVAERPEDLVVYGGIGKAARNWEAFEAIEKTLRELESDETMLVQSGKPVAVFKTHEEAPRVLISNSVLVPEWANWDHFNELDKKGLIMYGQMTAGSWIYIGSQGIVQGTYETFAELGNQHFNGDLAGTVTLTAGLGGMGGAQPLAITMNHGVAICVDVDETRVDKRIDTKYCDVKTADLDEALKLAEEAKERGEGLSIGLVGNAVDIHQAILEKGFKIDIITDQTSAHDPLNGYVPQGYSVEEAKVLREKDPKKYVELSQASMAKHVELMLEFQKRGAVAFDYGNNIRQVAFNNGVKNAFDFPGFVPAYIRPLFCEGKGPFRFAALSGDSKDIERADEEMRKLFPENEKLLRWLDLAEEKISYQGLPSRIAWLGYGERAKMGLALNRLVRDGEISAPIVIGRDHLDAGSVASPNRETESMKDGSDAVGDWAVLNALINTAAGGSWISFHHGGGVGMGYSLHAGMVVVADGSERAERRLERVLTTDPGMGVARHVDAGYDIAIQTAKEKGIHIPMIDKAGDK

SEQ ID NO: 12199 - protein, 293 aa, Staphylococcus aureus
MAAQDPRTKFKTTDYEKQEQEVPGLQSEMTPAPDCGETSYQGHQRLQGYKMLVTGGDSAIGRAAAIAYAKEGADVAINYLPSEEQDAQEVRQVIEESGQKAVLIPGDIRDEQFNYDLVEQAYQQLGGLDNVTLVAGHQQYHDDIHGFTTEAFTETFETNVYPLFWTIQKALEYLKPGASITTTSSVQGYNPSPILHDYAASKAAIISLTKSFSEELGPKGIRVNCVAPGPFWSPLQISGGQPQSKIPTFGQKTPLGRAGQPVELCGTYVLLASEESSYTTGQVFGVSGGVQID

SEQ ID NO: 12200 - protein, 137 aa, Staphylococcus aureus
MGYIMVKVTYDIPSCEDYCALRINAGMSPKTREAAEKGLPNALFTVTLYDKDRLIGMGRVIGDGGTVFQIVDIAVLKSYQGQGYGSQIMEHIMKYIKNVSVESAYVSLIADYPADKLYAKFGFMPTEPDSGGMYIKY

SEQ ID NO: 12201 - protein, 171 aa, Staphylococcus aureus; identical to SEQ ID NO: 5500

SEQ ID NO: 12202 - protein, 209 aa, Staphylococcus aureus; identical to SEQ ID NO: 5755

SEQ ID NO: 12203 - protein, 496 aa, Staphylococcus aureus
MMTLQIHTGGINLKKKNIYSIRKLGVGIASVTLGTLLISGGVTPAANAAQHDEAQQNAFYQVLNMPNLNADQRNGFIQSLKDDPSQSANVLGEAKKLNDSQAPKADAQQNNFNKDQQSAFYEILNMPNLNEEQRNGFIQSLKDDPSQSTNVLGEAKKLNESQAPKADNNFNKEQQNAFYEILNMPNLNEEQRNGFIQSLKDDPSQSANLLAEAKKLNESQAPKADNKFNKEQQNAFYEILHLPNLNEEQRNGFIQSLKDDPSQSANLLAEAKKLNYAQAPKADNKFNKEQQNAFYEILHLPNLTEEQRNGFIQSLKDDPSVSKEILAEAKKLNDAQAPKEEDNNKPGKEDSNKPGKEDGNKPGKEDGNKPGKEDGNKPGKEDGNKPGKEDGNKPGKEDGNGVHVVKPGDTVNDIAKANGTTADKIAADNKLADKNMIKPGQELVVDKKQPANHADANKAQALPETGEENPFIGTTVFGGLSLALGAALLAGRRREL

SEQ ID NO: 12204 - protein, 336 aa, Staphylococcus aureus
MNREMLYLNRSDIEQAGGNHSQVYVDALTEALTAHAHNDFVQPLKPYLRQDPENGHIADRIIAMPSHIGGEHAISGIKWIGSKHDNPSKRNMERASGVIILNDPETNYPIAVMEASLISSMRTAAVSVIAAKHLAKKGFKDLTIIGCGLIGDKQLQSMLEQFDHIERVFVYDQFSEACARFVDRWQQQRPEINFIATENAKEAVSNGEVVITCTVTDQPYIEYDWLQRGAFISNISIMDVHKEVFIKADKVVVDDWSQCNREKKTINQLVLEGKFSKEALHAELGQLVTGDIPGREDDDEIILLNPMGMAIEDISSAYFIYQQAQQQNIGTTLNLY

SEQ ID NO: 12205 - protein, 520 aa, Staphylococcus aureus
MFRYESSQPITIERRTSKQPLTAAEFWQTIANMNCDLSHEWEVARVEEGLTTAVTQLAKQLSELDLASHPFVMSEQFASLKDRPFHPLAKEKRGLREADYQVYQAELNQSFPLMVAAVKKTHMIHGDTANIDELESLTAPIKEQATDMLNDQALSIDDYVLFPVHPWQYQHILPNVFAKEISEKLVVLLPLKFGDYLSSSSMRSLIDIGAPYNHVKVPFAMQSLGALRLTPTRYMKNGEQAEQLLRQLIEKDEALAKYVMVCDETAWWSYMGQDNDIFKDQLGHLTVQLRKYPEVLAKNDTQQLVSMAALAANNRTLYQMICGKDNISKNDVMTLFEDIAQVFLKVTLSFMQYGALPELHGQNILLSFEDGRVQKCVLRDHDTVRIYKPWLTAHHLSLPKYVVREDTPNTLINEDLETFFAYFQTLAVSVNIYAIIDAIQDLFGVSEHELMSLLKQILKNEVATISWVTTDQLAVRHILFDKQTWPFKQILLPLLYQRDSGGGSMPSGLTTVPNPMVTYD

SEQ ID NO: 12206 - protein, 578 aa, Staphylococcus aureus
MQNKELIQHAAYAAIERILNEYFREENLYQVPPQNHQWSIQLSELETLTGQFAYWSAMGHHMYHSEVWLIDGKSKKLTTYKEAIARILQHMAQSADNQTAVQQHMAQIMSDIDNSIHRTARYLQSNTIDYAEDRYIVSEQSLYLGHPFHPTPKSASGFSEADLEKYAPECHTSFQLHYLAVHQDVLLTRYVEGKEDQVEKVLYQLADIDISEIPKDFILLPIHPYQINVLQQHPQYLQYSEQGLIKDLGVSGDSVYPTSSVRTVFSKALNIYLKLPIHVKITNFIRTNDLEQIERTIDAAQVIASVKDEVETPHFKLMFEEGYRALLPNPLGQTVEPEMDLLTNSAMIVREGIPNYHADKDIHVLASLFETMPDSPTSKLSQVIEQSGLAPEAWLECYLDRTLLPILKLYSNTGISLEAHVQNSLIELKDGIPDVCFVRDLEGICLSRTIATEKQLVPNVVAASSPVVYAHDEAWHRLKYYVVVNHLGHLVSTIGKATKNEVVLWQLVAHRLMTWKKEYANNAVFVDCVEDLYQTPTIAAKANLMSKLNDCGANPIYTHIPNPICHNKEVSYCESNNS

SEQ ID NO: 12207 - protein, 258 aa, Staphylococcus aureus
MQQLSLKHRLNNGDSVYGIFNSIPDPLMIEVIAASGYDFVVIDTEHVAINDETLAHLIRAAEAAHIIPIVRVTAVIDRDIIKVLDMGARGIIVPHVKDRETVEHIVKLSRYYPQGLRSLNGGRMARFGRTPLLDAMEMANEHIMVIAMIEDVEGVMAIDDIAQVEGLDMIVEGAADLSQSLGIPWQTRDDQVTSHVQHIFEVVNAHGKHFCALPREDEDIAKWQAQGVQTFILGDDRGKIYRHLSASLATSKQKGDED

SEQ ID NO: 12208 - protein, 400 aa, Staphylococcus aureus
MRIVQPVIEQLKAQSYPVCHYIYDLVGLEHHLQHITSSLPNNCQMYYAMKANSERTILDTISQYVEGFEVASQGEIAKGLAFKPANHIIFGGPGKTDEELRYAVSEGVQRIHVESMHELQRLNAILEDEDKTQHILLRVNLAGPFPNATLHMAGRPTQFGISEDEVDDVIEATLAMPNIHLDGFHFHSISNNLDSNLHVDVVKLYFKKAKAWSEKHQFPLKHINLGGGIGVNYADLTSQFEWDNFVENFKTLIVEQEMEDVTLNFECGRFIVAHIGYYVTEVLDIKKVHGAWYAILRGGTQQFRLPVSWQHNHPFDIYRYKDNPYSFEKVSISRQDTTLVGQLCTPKDVFAREVQIDAISTGDVIVFKYAGAYGWSISHHDFLSHPHPEFIYLTQTKEDE

SEQ ID NO: 12209 - protein, 745 aa, Staphylococcus aureus
MQRDYLIRVETESMSDFKRLNGLMIGFVIKGEAHIYDEHNMMQCNSGDIFIINHRDLYRFQLQQDGIICYIQFQMKYLADKFDDVHCLYFHLTDATTTKNIHQLRNIMARLVSTHIRHNELSKLTEQQLVIQLLMHMIHYVPRTYHSNQSILNDDKVNQVCDYIELHFHEDLSLSELSEYVGWSESHLSKKFAESLGVGFQHFLNTTRIEHVKLDLTYTDETITDIALQNGFSSAASFARTFKHFTHQTPKQYRGDRPAITENQQSAQHNYHDRELILLLNDYIEEMNHFIEDIEKVNYKEITFQPTNHQLNQFNHITQVGYLRNLLNTQYQSQLLTCHHDFHVNEVLAYDVMPYIMKKLNAPFTYDAEISNIFYDIDLCLDFLLDNNFSLTMHLDQYDSRDYIDAFKIFIHHVALHVSHRKDLKFNLYVTTLHTSLIEMIDYFKALFPNGGLYIHLDQATERHLPLLKRLEPHIDHFVFDANSNDAVDFNKMNDDEFKTASQMIINKTNYLIDLMHRHHLKRPLILLNWNTLTGDTFITNGEYFRGGIIIEQLLKLSSKVEGIGYWLNYDLHVSHCRNERDYMNSIELFHQYNGKRPVYFTALLFNKLTSNILYSDDTCIVTGTDSNFQILLYDAKHFNPYLALDNQMNMRATEMIHLNINALEEGMYKIKHFTLDKENGALFNLWRKHHTIHGMDKDSIDYVNRMSFPKLEVYDIDMMDTLALNIKMITNGIHLIEVKRYPSS

SEQ ID NO: 12210 - protein, 313 aa, Staphylococcus aureus
MRNIENLNPGDSVDHFFLVHKATQGVTAQGKDYMTLHLQDKSGEIEAKFWTATKNDMATIKPEEIVHVKGDIINYRGNKQMKVNQIRLATTEDQLKTEQFVDGAPLSPAEIQEEISHYLLDIENANLQRITRHLLKKYQERFYTYPAASSHHHNFASGLSYHVLTMLRIAKSICDIYPLLNKSLLYSGIILHDIGKVRELSGPVATSYTVEGNLLGHISIASDEVVEAARELNIEGEEIMLLRHMILSHHGKLEYGSPKLPYLKEAEILCYIDNIDARMNMFEKAYKKTDKGQFTDKIFGLENRRFYNPESLD

SEQ ID NO: 12211 - protein, 981 aa, Staphylococcus aureus
MNKMIIKSLEIYGYGQFVQRKIEFNKNFTEIFGENEAGKSTIQAFIHSILFGFPTKKSKEPRLEPRLGNQYGGKLVLILDDGLEIEVERIKGSAQGDVKVYLPNGAVRDDAWLQKKLNYISKKTYQGIFSFDVLGLQDIHRNLNEKQLQDYLLQAGALGSTEFTSMREVINRKKDELYKKSGKNPIINQQIEQLKQLESQIREEEAKLETYHRLVDDRDKSSRRLENLKHNLNQLSKMHEEKQKEVALHDHSQEWKSLEQQLNIEPITFPEKGVDRYEKARAHKQSLERDIGLRNERLAQLKEEATQLEPVKQSDIDAFISLNQQENEIKNKEFELTAIEKDIANKQRDKDELQANIGWSETHHDVDSSEAMKSYVSEQIKNKQEQAAYIKQLERSLEENKIEDNAVHSELDSVEEKIVPEETFEKKKEYSQQVIELNEKENLYSKLKERFEIEQQEKQKRQKLLRTTFILLTLVGIGLTAFSFISNNMLFGIIFAVLTLVFVIGIIMSKSKEVDYSEAITDEIEEIKEQLAILDENYDLDFDLDEQYRIRDHWQQALKNKDILEEKRQYIEGRLNDAKGRHDELQSTVENVKDELYLSSKISNDLIVDSISTMANIKALDQHISDLNQQRQQLVQELDTFYNHAEAVTKSQFVYFNKLSLFHDVQQWLKSAEDTNEKWRINAENTKLVTNELNHLNAQLEENNKKITALFDFINVGTEEDFYQHHEDYQTYTSNLSRFNDLTKYLENQNYSYELSSSLSEKTTAQLEEEDHLLATQVDEYNEQYLEMQAQVSDLSAQINHMETDTTLANLRHEYHSLKNQLNDIAKDWASLSYLQSLVDEHIKQIKDKRLPQVINEAVEILKHLTDGRYTMINYNEDSITVKHVNGQLYDPVELSQSTKELLYVALRISLIKVLRPYYPFPLIVDDAFVHFDKKRTEKMLNYLRSLSEHYQVLYFTCVKDNIVPSKEVITLNKIEEGGKR

SEQ ID NO: 12212 - protein, 398 aa, Staphylococcus aureus
MVKFIHCSDLHLDSPFKSKSHISPKIFEDVQKSAYESFKNIVDIALQQDVDFVIIAGDLFDSENRTLRAEIFLKQQFERLQNEQIFVYVCHGNHDPLSSKISSNWPDNVSVFSNKVETYEAITKSGETIYIHGFSYENRASYENKIDEYPSSQGQKGIHIGVLHGTYSKSSVNERYTEFILEDLNSKLYHYWALGHIHERQQLSDMPVINYSGNIQGRHFNEQGEKGCLLIEGDHLKLKTKFYPTQYIRFEEATIETDKTSKQGLYEVIQNFKEQVREEGKAFYRLTLVINSETLISPQDLLQVEEMITDYEENENQFVYIDELKIQYAQNDESPLVNEFSAELLVDQTVFDKAMSDLYLNPRASKFLDDYGTFDHTALVNRAEEILKAEMRGEQNDN

SEQ ID NO: 12213 - protein, 184 aa, Staphylococcus aureus
MTDVIIVHSMHGNSRNHWYQWLEHNLTLEGYDVTLFNFESPEANTVEQWIEAMTKQINVRKKDTYFVTHGLGSITALKYIEMIDQPIEGFFSIAGFKEDAENIDLDIDLSNVTIDYDNIKKKVDNFYGLSSKNDKYVSYKETQRLMNALEGNLRIVEDGGHFLEEDGFETFTALQDRMQDYMTR

SEQ ID NO: 12214 - protein, 77 aa, Staphylococcus aureus
MRNWVVKQMKAKEIRDLTTSEIEEQIKSSKEELFNLRFQLATGQLEETARIRTVRKTIARLKTVAREREIEQSKANQ

SEQ ID NO: 12215 - protein, 87 aa, Staphylococcus aureus
MSERNDRKVYVGKVVSDKMDKTITVLVETYKTHKLYGKRVKYSKKYKTHDENNSAKLGDIVKIQETRPLSATKRFRLVEIVEESVII

SEQ ID NO: 12216 - protein, 122 aa, Staphylococcus aureus; identical to SEQ ID NO: 5532

SEQ ID NO: 12217 - protein, 105 aa, Staphylococcus aureus
MHIKKGDNVKVIAGKDKGKEGKVIATLPKKDRVVVEGVNIMKKHQKPTQLNPEGGILETEAAIHVSNVQLLDPKTNEPTRVGYKFVDGKKVRIAKKSGEEIKSNN

SEQ ID NO: 12218 - protein, 163 aa, Staphylococcus aureus
MKKFNYSSVMEVPKIDKIVVNMGVGDAVQNSKVLDNAVEELELITGQKPLVTKAKKSIATFRLREGMPIGAKVTLRGERMYEFLDKLISVSLPRVRDFQGVSKKAFDGRGNYTLGVKEQLIFPEIDYDKVSKVRGMDIVIVTTANTDEEARELLANFGMPFRK

SEQ ID NO: 12219 - protein, 132 aa, Staphylococcus aureus; identical to SEQ ID NO: 5536

SEQ ID NO: 12220 - protein, 178 aa, Staphylococcus aureus
MSRVGKKIIDIPSDVTVTFDGNHVTVKGPKGELSRTLNERMTFKQEENTIEVVRPSDSKEDRTNHGTTRALLNNMVQGVSQGYVKVLELVGVGYRAQMQGKDLILNVGYSHPVEIKAEENITFSVEKNTVVKVEGISKEQVGALASNIRSVRPPEPYKGKGIRYQGEYVRRKEGKTGK

SEQ ID NO: 12221 - protein, 119 aa, Staphylococcus aureus; identical to SEQ ID NO: 5537

SEQ ID NO: 12222 - protein, 166 aa, Staphylococcus aureus
MARREEETKEFEERVVTINRVAKVVKGGRRFRFTALVVVGDKNGRVGFGTGKAQEVPEAIKKAVEAAKKDLVVVPRVEGTTPHTITGRYGSGSVFMKPAAPGTGVIAGGPVRAVLELAGITDILSKSLGSNTPINMVRATIDGLQNLKNAEDVAKLRGKTVEELYN

SEQ ID NO: 12223 - protein, 59 aa, Staphylococcus aureus; identical to SEQ ID NO: 5539

SEQ ID NO: 12224 - protein, 67 aa, Staphylococcus aureus
MSGPIPLPTEKSVYTIIRAVHKYKDSREQFEQRTHKRLIDIVNPTPKTVDALMGLNLPSGVDIEIKL

SEQ ID NO: 12225 - protein, 146 aa, Staphylococcus aureus; identical to SEQ ID NO: 5540

SEQ ID NO: 12226 - protein, 430 aa, Staphylococcus aureus
MIQTLVNFFRTKEVRNKIFFTLAMLVIFKIGTYIPAPGVNPAAFDNPQGSQGATELLNTFGGGALKRFSIFAMGIVPYITASIVMQLLQMDIVPKFSEWAKQGEVGRRKLNNVTRYLAISLAFIQSIGMAFQFNNYLKGALIINQSIMSYLLIALVLTAGTAFLIWLGDQITQFGVGNGISIIIFAGILSTLPASLIQFGQTAFVGQEDTSLAWLKVLGLLVSLILLTVGAIYVLEAVRKIPIQYAKKQTAQRLGSQATYLPLKVNSAGVIPVIFAMAFFLLPRTLTLFYPDKEWAQNIANAANPSSNVGMVVYIVLIILFTYFYAFVQVNPEKMADNLKKQGSYVPGIRPGEQTKKYITKVLYRLTFVGSIFLAVISILPILATKFMGLPQSIQIGGTSLLIVIGVAIETMKSLEAQVSQKEYKGFGGR

SEQ ID NO: 12227 - protein, 224 aa, Staphylococcus aureus
MVDNFRRALMNIILMGLPGAGKGTQASEIVKKFPIPHISTGDMFRKAIKEETELGKEAKSYMDRGELVPDEVTVGIVKERISEDDAKKGFLLDGFPRTIEQAEALNNIMSELDRNIDAVINIEVPEEELMNRLTGRRICESCGTTYHLVFNPPKVEGICDIDGGKLYQREDDNPETVANRLSVNIKQSKPILDFYDQKGVLKNIDGSKDISDVTKDVIDILDHL

SEQ ID NO: 12228 - protein, 72 aa, Staphylococcus aureus; identical to SEQ ID NO: 5543

SEQ ID NO: 12229 - protein, 121 aa, Staphylococcus aureus; identical to SEQ ID NO: 5545

SEQ ID NO: 12230 - protein, 129 aa, Staphylococcus aureus
MARKQVSRKRRVKKNIENGVAHIRSTFNNTIVTITDEFGNALSWSSAGALGFKGSKKSTPFAAQMASETASKSAMEHGLKTVEVTVKGPGPGRESAIRALQSAGLEVTAIRDVTPVPHNGCRPPKRRRV

SEQ ID NO: 12231 - protein, 314 aa, Staphylococcus aureus; identical to SEQ ID NO: 5547

SEQ ID NO: 12232 - protein, 122 aa, Staphylococcus aureus; identical to SEQ ID NO: 5548

SEQ ID NO: 12233 - protein, 306 aa, Staphylococcus aureus
MSQKILVIYSKPSQCHIQRFINIVKYDRYTNRKGERQVEDKNSVIVFKNVSFQYQSDASFTLKDVSFNIPKGQWTSIVGHNGSGKSTIAKLMIGIEKVKSGEIFYNNQAITDDNFEKLRKDIGIVFQNPDNQFVGSIVKYDVAFGLENHAVPHDEMHRRVSEALKQVDMLERADYEPNALSGGQKQRVAIASVLALNPSVIILDEATSMLDPDARQNLLDLVRKVKSEHNITIISITHDLSEAMEADHVIVMNKGTVYKEGTAIEIFDHAEELTTIGLDLPFPIKINQMLGHQTSFLTYEGLVDQL

SEQ ID NO: 12234 - protein, 286 aa, Staphylococcus aureus
MTIRFDNVSYTYQKGTPYQHQAIHDVNTEFEQGKYYAIVGQTGSGKSTLIQNINALLKPTTGTVTVDDITITHKTKDKYIRPVRKRIGMVFQFPESQLFEDTVEREMIFGPKNFKMNLDEAKNYAHRLLMDLGFSRDVMSQSPFQMSGGQMRKIAIVSILAMNPDIIVVDEPTAGLDPQSKRQVMRLLKSLQTDENKTIILISHDMNEVARYADEVIVMKEGSIVSQTSPKELFKDKEKLADWHIGLPEIVQLQYDFEQKHQTKLKDIALTEEAFVSLYKEWQHEK

SEQ ID NO: 12235 - protein, 220 aa, Staphylococcus aureus
MTKGILGRKIGMTQVFGENGELIPVTVVEAKENVVLQKKTVEVDGYNAIQVGFEDKKAYKKDAKSNKYANKPAEGHAKKADTAPKRFIREFRNVDVDAYEVGQEVSVDTFVAGDVIDVTGVSKGKGFQGAIKRHGQSRGPMSHGSHFHRAPGSVGMASDASRVFKGQKMPGRMGGNTVTVQNLEVVQVDTENKVILVKGNVPGPKKGLVEIRTSIKKGNK

SEQ ID NO: 12236 - protein, 268 aa, Staphylococcus aureus
MKNKLIIGRYLPINSFVHHLDPRAKLMFVFLFIILIFFCHSPLTYLWVFALILFFMRLAKIQLWFLIKGLTPIFFFLIFTLMMHIFLTKGGYVLVEWHGITIETNGILEGLYISLRLIGIVMIATIMTLSTSPIDLTDAFERLLAPLKMFKLPVHQLSMIMSIALRFIPTLMDELDKIILAQKSRGSEISSGNIATRIKSFIPLLVPLFISAFQRAEELAVAMEVRGYDANVKRTSYRQLKWQLRDTLSLIMIIPIAIILFVLKYSGV

SEQ ID NO: 12237 - protein, 145 aa, Staphylococcus aureus; identical to SEQ ID NO: 5551

SEQ ID NO: 12238 - protein, 132 aa, Staphylococcus aureus
MTLAQVEYRGTGRRKNSVARVRLVPGEGNITVNNRDVREYLPFESLILDLNQPFDVTETKGNYDVLVNVHGGGFTGQAQAIRHGIARALLEADPEYRGSLKRAGLLTRDPRMKERKKPGLKAARRSPQFSKR

SEQ ID NO: 12239 - protein, 238 aa, Staphylococcus aureus
MGNFMASVLYQHGTLGTLMAGLLKGTASINELLQHGDLGIATLTGSNGEVIFLDGKAYHANEHKEFVELKGNELTPYATVTKFVADTSYETKDKSSEAVFAEIKEKMLSENLFSAVKISGLFKKMHVRMMPAQEPPYTRLIDSARRQPEQTETYVKGSVVGFFTPELFHGIGSAGFHVHFANDDRNFGGHVLDFEVEDVKVEIQNIETFEQHFPIQDEDFINANIDYKDIADEIREAE

SEQ ID NO: 12240 - protein, 207 aa, Staphylococcus aureus
MANYDVLKLDGTKSGSIELSDAVFGIEPNNSVLFEAINLQRASLRQGTHAVKNRSAVSGGGRKPWKQKGTGRARQGTIRAPQWRGGGIVFGPTPRSYAYKMPKKMRRLALRSALSFKAQENGLTVVDAFNFEAPKTKEFKNVLSTLEQPKKVLVVTENEDVNVELSARNIPGVQVTTAQGLNVLDITNADSLVITEAAAKKVEEVLG

SEQ ID NO: 12241 - protein, 282 aa, Staphylococcus aureus
MKHIEISKDVKIPVLGFGVFQIPQEQTAEAVKEAIKAGYRHIDTAQSYLNETEVGQGIEASGIDRSELFITTKVWIENVNYEDTIKSIERSLQRLNLDYLDLVLIHQPYNDVYGSWRALEELKETGKIKAIGVSNFSVDRIVDLGIHNQIQPQVNQIEINPFHQQEEQVAALQQENVVVEAWAPFAEGKNQLFQNQLLQAIADKYNKSIAQVILRWLVERDIVVLAKSVNPERMAQNLDIFDFELTEEDKQQIATLEESNSQFFSHADPEMIKALTSRELDV

SEQ ID NO: 12242 - protein, 91 aa, Staphylococcus aureus
MEARDILKRPVITEKSSEAMAEDKYTFDVDTRVNKTQVKMAVEEIFNVKVASVNIMNYKPKKKRMGRYQGYTNKRRKAIVTLKEGSIDLFN

SEQ ID NO: 12243 - protein, 142 aa, Staphylococcus aureus; identical to SEQ ID NO: 5622

SEQ ID NO: 12244 - protein, 171 aa, Staphylococcus aureus; identical to SEQ ID NO: 5623

SEQ ID NO: 12245 - protein, 326 aa, Staphylococcus aureus; identical to SEQ ID NO: 5624

SEQ ID NO: 12246 - protein, 103 aa, Staphylococcus aureus; identical to SEQ ID NO: 5625

SEQ ID NO: 12247 - protein, 573 aa, Staphylococcus aureus
MMTMMQKLIAQIEKGKPFFEKLSRNIYLRAIRDGFISAMPVILFSSIFLLIAYVPNIFGFKWDKGMEAILMKPYNYTMGLVAFLVAGTTAKSLTDSFNRKLESTNQINFISTMLAAMCGFLFLASDPAKDGGFLSAFMGTKGLLTAFLSAFVTVIVYNFCVKRNITIKMPKEVPPNISQVFKDLIPFSAVIIILYALDLVIRNSFKSNVAEGILKLFEPLFTAADGWIGVTIIFGAFALFWFVGIHGPSIVEPAIAAITYANIEANFKLLQAGEHADKIITSGTQMFIVTFGGTGATLVVPFMFMWMTKSKRNKAIGRASVVPTFFGVNEPILFGAPLVLNPVFFIPFVLAPIVNVWIFKLFVEVLGMNSFSVNLPWTTPGPLGIIMGTGFGLWSFVLAITLIVVDIIIYYPFLKVYDSEILDEEEGRKESNSDLKEKVAANFDTKKADSILAASGVSDDAAKASNITEQTNVLVLCAGGGTSGLLANALNKAAEEYHVPVKAAAGGYGAHMDIMKEYQLIILAPQVASNYEDIKQDTDRLGIKLAKTQGAEYIKLTRDGQAALDFVQQQFEN

SEQ ID NO: 12248 - protein, 470 aa, Staphylococcus aureus; identical to SEQ ID NO: 5627

SEQ ID NO: 12249 - protein, 277 aa, Staphylococcus aureus; identical to SEQ ID NO: 5708

SEQ ID NO: 12250 - protein, 335 aa, Staphylococcus aureus
MMQNKQILFNKIPEGMPQEDTFKIEDVDTPKLESDGVLVQTLYISVDPYMRGRMTKADSYVQPFEIGKPIVSHVVAKVIDSTLADYKKGDVVVGMLPWRIINHVQADQITKVPTTDVPLDLYLSVLGMPGQTAYHGLLDIGQPKDGDTVVVSAASGAVGSVVGQIAKIKGCRVVGIAGGDKKVNYLTETLGFDAGIDYKKEDFAEALAQAVPDGIDVYFENVGGTVGDEVFKHLNRFARVPVCGAISSYNHPEAGIGPRIQGTLIKKQVMMRGFLVSEFADDFKEASEQLATWVQEGKIQSQVTIEDGFENAPRAFKNLFTGDNFGKQVIKVSEL

SEQ ID NO: 12251 - protein, 335 aa, Staphylococcus aureus
MKMIGFEKPFKLEEGNLFKVYEQRKPTPENDDILVKVNSISVNPVDTKQRQMEVTQVPRVLGFDAIGTVEAIGPDVTLFSPGDVVFYAGSPNRQGSNATYQLVSEAIVAKAPHNISANEAVSLPLTGITAYETFFDTFKISHNPSENIGKSVLIINGAGGVGSIATQIAKRYGLTVITTASRQETTEWCEKMGADIVLNHREDLVLQFKEKEIPLVDYIFCTYNTDLYYNTMIELIKPLGHITTIVAFNEDQDLNALKLKSITFTHEFMFARPIHRTPDMIKQHEYLEDITKNIESGHYQPTTTQVFEGLSPENLYQAHQLLEKQSMIGKLVINI

SEQ ID NO: 12252 - protein, 182 aa, Staphylococcus aureus
MSLGVKRLKNFILGLLIVVIVGFLLFMYIQDGRITEYQDYFLQFEWFQPLLISLAALLILIGLILVFSIFKPTHRKPGLYKDFDDGHVYVSRKAVEKTAFDTVAKYDQVRQPNVVAKLYNKKNKSYIDIKTDFFVPNNVQVQSLTEAIRADIKKNVEYFTEMPVRKLEVNVRDQKTSGPRVL

SEQ ID NO: 12253 - protein, 658 aa, Staphylococcus aureus
MNLNLIFKEQTLKFNKEEQETYLFLQQHNSDWANIFKEMILQGRDKVTQRLVTSMHRENLVKARTQSKKILSRDLIMLDISTTHTLEIQFPQAKQTLYAPITGEHAFDRIDVEGPFYIKDDITNTITRVHHPNEILECILIEAPDLKNAASDQFQQDLINSATNMTFAISYQALSMQHDSAPLFNIIENSEDSYLRSEQAVIEGHPLHPGAKLRKGLNALQTFLYSSEFNQPIKLKIVLIHSKLSRTMSLSKDYDTTVHQLFPDLIKQLENEFTPNFNFNDYHIMIVHPWQLDDVLHSDYQAEVDKKLIIEAKHTLDYYAGLSFRTLVPKYPAMSPHIKLSTNVHITGEIRTLSEQTTHNGPLMTRILNDILEKDVIFKSYASTIIDEVAGIHFYNEQDEADYQTERSEQLGTLFRKNIYQMIPQEVTPMIPSSLVATYPFNNESPIVTLIKRYQSAASLSDFESSAKSWVETYSKALLGLVIPLVTKYGIALEAHLQNAIATFRKDGLLDTMYIRDFEGLRIDKAQLNEMGYSTSHFHEKSRILTDSKTSVFNKAFYSTVQNHLGELILTISKASKDSNLERHMWYIVRDVLDNIFDQLVLSTHKSNQVNENRINEIKDTMFAPFIDYKCVTTMRLEDEAHHYTYIKVNNPLYRENN

SEQ ID NO: 12254 - protein, 337 aa, Staphylococcus aureus
MKLYILRSGTMRGLKTFSILGLIVALFLVAACGNTDNSSKKESSTKDTISVKDENGTVKVPKDAKRIVVLEYSFADALAALDVKPVGIADDGKKKRIIKPVREKIGNYTSVGTRKQPNLEEISKLKPDLIIADSSRHKGINKELNKIAPTLSLKSFDGDYKQNINSFKTIAKALNKEKEGEKRLAEHDKLIKKYKDEIKFDRNQKVLPAVVAKAGLLAHPNYSYVGQFLNELGFKNALSDDVTKGLSKYLKGPYLQLDTEHLADLNPERMIIMTDNAKKDSAEFKKLQEDPTWKKLNAVKNNRVDIVDRDVWARSRGLISSEEMAKELVELSKKEQK

SEQ ID NO: 12255 - protein, 108 aa, Staphylococcus aureus
MCGLKLHAHNKKGGAQMARSIKKGPFVDEHLMKKVEAQEGSEKKQVIKTWSRRSTIFPNFIGHTFAVYDGRKHVPVYVTEDMVGHKLGEFAPTRTFKGHVADDKKTRR

SEQ ID NO: 12256 - protein, 179 aa, Staphylococcus aureus
MLDKNQLAKYKQDHLCEYEKIMSNNEKEALEEKVASLDLDFIAKLYNDLYINKRTIDDVSAVSEVKYDIKSQMSDDEIKRIEDQGLQAIKEGQFAVLLMAGGQGTRLGYKGPKGSFEIEGVSSFELQANQLQTLNHQSGHTIQWYIMTSDINHEEALANCKAHSYLGNDQKPIPLFKTR

SEQ ID NO: 12257 - protein, 228 aa, Staphylococcus aureus
MTKSQSHSLKQDNIGALSKEGKLFLNQQGRIMETPNGNGGVFKSLDKAGYLEEMSNNGVKYIFLNNIDNVLVKVLDPLFAGFTVEHDYDITSKTIQPKPGESVGRLVNVDCKDTVLEYSELDPEVANQFNNANIGIHAFKLGFILNAVNRELPYHLAIKNLKQLDENFGVIEQPTLKFELFYFDIFTYGTSFVTLQVPREEEFSPLKNKEGKDSVATATEDLRRMGLI

SEQ ID NO: 12258 - protein, 117 aa, Staphylococcus aureus
MEAKAVARTIRIAPRKVRLVLDLIRGKNAAEAIAILKLTNKASSPVIEKVLMSALANAEHNYDMNTDELVVKEAYANEGPTLKRFRPRAQGRASAINKRTSHITIVVSDGKEEAKEA

SEQ ID NO: 12259 - protein, 217 aa, Staphylococcus aureus
MGQKINPIGLRVGIIRDWEAKWYAEKDFASLLHEDLKIRKFIDNELKEASVSHVEIERAANRINIAIHTGKPGMVIGKGGSEIEKLRNKLNALTDKKVHINVIEIKKVDLDARLVAENIARQLENRASFRRVQKQAITRAMKLGAKGIKTQVSGRLGGADIARAEQYSEGTVPLHTLRADIDYAHAEADTTYGKLGVKVWIYRGEVLPTKNTSGGGK

SEQ ID NO: 12260 - protein, 144 aa, Staphylococcus aureus; identical to SEQ ID NO: 5693

SEQ ID NO: 12261 - protein, 401 aa, Staphylococcus aureus; identical to SEQ ID NO: 5506

SEQ ID NO: 12262 - protein, 185 aa, Staphylococcus aureus; identical to SEQ ID NO: 5507

SEQ ID NO: 12263 - protein, 67 aa, Staphylococcus aureus; identical to SEQ ID NO: 5863

SEQ ID NO: 12264 - protein, 326 aa, Staphylococcus aureus
MTMKRLSIIVIIGIFIITGCDWQRTSKEPSKNAQQQQVIKIGYLPITHSANLMMTKKLLSQHNHPKYKLELVKFNNWPDLMDALNSGRIDGASTLIELAMKSRQKGSNIKAVALGHHEGNVIMGQKGMHLNEFNNNGDDYHFGIPHRYSTHYLLLEELRKQLKIEPGHFSYHEMSPAEMPAALSEHRITGYSVAEPFGALGEKLGKGKTLKHGDDVIPDAYCCVLVLRGELLDQHKDVAQAFVQDYKKSGFKMNDRKQSVDIMTHHFKQSRDVLTQSAAWTSYGDLTIKPSGYQEITTLVKQHHLFNPPAYDDFVEPSLYKEASRS

SEQ ID NO: 12265 - protein, 2397 aa, Staphylococcus aureus
MKEGLFMIMGNLRFQQEYFRIYKNNTESTTHRNAYWVKLAENVEATKMMYALSTIVQQHASIRHFFDVTTDDNLTMILHEFLPFIEIKQVPSSSANYDLEAFFKQELSTYHFNDSPLFKFKLFQFADAAYILLDFHVSIFDDSQIDIFLDDLCNAYRGNTVINNTRQHAHLNRNDDKDNQDASHIALDSNYFRLEKNSDIHIDSYLPIKHPFEQALYQTYLIDDMTSIDMASLAVSVYLANHIMSQQHDVTLGIHVPSHLPNDLHGNIVPLTLTIDAKDVCQRFTTDFNKCVLQNMSQLQCAKSSLSLETIFHCYHQMMPCCNDVIEDVHQIHDAHTSLADIEIFPHQHGFKIIYNSAAYDLLSIETLSDLVRNIYLQITEENGNKRTTVDELNLMTERDIQLYDDINLSLPDLDDAQTVVTLFEQQVEATPNHVAVQFDGVFITYQTLNARANDLAHRLRNQYGVEPNDRVAVIAEKSIEMIIAMIGVLKAGGAYVPIDPNYPSDRQEYILKDATPKVVITYQALYENSKQNINHIDLNKIAWKNIDNLSECNTLEDHAYVIYTSGTTGNPKGTLIPHRGIVRLVHQNHYVPLNEETTILLSGTIAFDAATFEIYGALLNGGKLIVAKKEQLLNPIALEQLINENDVNTMWLTSSLFNQIASERIEVLVPLKYLLIGGEVLNAKWVDLLNQRPKHPQIINGYGPTENTTFTTTYNIPNKVPNRIPIGKPILGTHVYIMQGERRCGVGIPGELCTSGFGLAAGYLNQPELTADKFIKDSNINQLMYRSGDIVRLLPDGNIDYLYRKDKQVKIRGFRIELSEVEHALERIQGINKAVVIVQNHDQDQYIVAYYEAMHTLSHNKIKSQLRMTLPEYMIPVNFMHIEQIPITINGKLDKKALPIMDYVDTDAYVAPSTDTEHLLCQIFADILHVNQVGIHDNFFELGGHSLKATLVVNRIEASTGKRLQIGDLLQKPTVFELAQAIAKVQEQNYEVIPEAIVKDDYVLSSAQKRMYLLWKSNHKDTVYNVPFLWRLSSELNVAQLRQAVQHLIARHEILRTQYIVVDDEVRQRIVADVVADFEEVNTHFTDEQEIMRQFVAPFNLEKPSQIRVRYIRSPLHAYLFIDTHHIINDGMSNIQLMNDLNALYQHKLLLPLKLQYKDYSEWMSHRDMTKHRQYWLSQFKDEVPILSLPTDYVRPNIKTTNGAMMSFTMNQQTRQLLQKYVEKHQITDFMFFMSVVMTLLSRYARKDDVVVGSVMSARMHKGAEQMLGMFANTLVYRGQPSPDKMWTQFLQEVKEMSLEAYEHQEYPFECLVNDLDQSHDASRNPLFDVMLVLQNNETNHAHFGHSKLTHIQPKSVTAKFDLSFIIEEDRDDYTINIEYNTDLYHSETVRHMGNQCMIMIDYILKHQDTLQICDIPNGTEELLNWVNTHVNDRMLNVPGNKSIISYFNEVVSRQGNHVALVMNDLTMTYETLRNYVDAIAHILLSNGVGNGQRVALFTERSFEMIAAMLATVKVGASYIPIDIDFPKKRQGAILEDAKVTAVMSYGIEIETTLPVIQLENAKGFVESKENEQYDDLHGDQLENTAMLDNEMYAIYTSGTTGMPKGVAIRQRNLLNLVHAWSTELQLGDNEVFLQHANIVFDASVMEIYCCLLNGHTLVIPDREERVNPAQLQQLINKHRVTVASIPLQMCSVMEDFYIEKLITGGATSTASFVKYIEKHCGTYFNAYGPSESTVITSYWSHQCGDLIPETIPIGKPLSNIQVYIMSEGLLCGIGMPGELCIAGDSLAIGYINRPELMADKWQNNPFGKGKLYHSGDLARYTSDGQIEFLGRIDKQVKVNGYRIELDEIENAILAIRGISDCVVTVSHFDTHDILNAYYVGEQQVEQDLKQYLNDHLPKYMIPKTITHIDCMPLTTNDKVDTTRLPNPSPIQQSNKVYSEPSNEIEQTFVDVFGEVLKQNDVGVDDDFFELGGNSLEAMLVVSDLKRFGHHISMQTLYQYKTVRQIVNYMHQNQQSLVALPDNLSELQNIVMTRYNLGILEDSLSHRPLGNTLLTGATGFLGAYLIEALQGYSHRIYCFVRADNEEIAWYKLMTNLNDYFSEETVEMMLSNIEVIVGDFECMDDVVLPENMDTIIHAGARTDHFGDDDEFEKVNVQGTVDVIRLAQQHHARLIYVSTISVGTYFDIDTEDVTFSEADVYKGQLLTSPYTRSKFYSELKVLEAVNNGLDGRIVRVGNLTSPYNGRWHMRNIKTNRFSMVMNDLLQLNCIGVSLAEMPVDFSFVDTTARQIVALAQVNTPQIIYHVLSPNKMPVKSLLECVKRKEIELVSDESFNEILQKQDMYETIGLTSVDREQQLAMIDTKLTLKIMNHISEKWPTITNNWLYHWAQYIKTIFNK

SEQ ID NO: 12266 - protein, 869 aa, Staphylococcus aureus
MLTIPEKENRGSKEQEVAIMIDALADKGKKALEALSKKSQEEIDHIVHQMSLAAVDQHMVLAKLAHEETGRGIYEDKAIKNLYASEYIWNSIKDNKTVGIIGEDKEKGLTYVAEPIGVICGVTPTTNPTSTTIFKAMIAIKTGNPIIFAFHPSAQESSKRAAEVVLEAAMKAGAPKDIIQWIEVPSIEATKQLMNHKGIALVLATGGSGMVKSAYSTGKPALGVGPGNVPSYIEKTAHIKRAVNDIIGSKTFDNGMICASEQVVVIDKEIYKDVTNEFKAHQAYFVKKDELQRLENAIMNEQKTGIKPDIVGKSAVEIAELSGIPVPENTKLIIAEISGVGSDYPLSREKLSPVLALVKAQSTKQAFQICEDTLHFGGLGHTAVIHTEDETLQKDFGLRMKACRVLVNTPSAVGGIGDMYNELIPSLTLGCGSYGRNSISHNVSATDLLNIKTIAKRRNNTQIFKVPAQIYFEENAIMSLTTMDKIEKVMIVCDPGMVEFGYTKTVENVLRQRTEQPQIKIFSEVEPNPSTNTVYKGLEMMVDFQPDTIIALGGGSAMDAAKAMWMFFEHPETSFFGAKQKFLDIGKRTYKIGMPENATFICIPTTSGTGSEVTPFAVITDSETNVKYPLADFALTPDVAIIDPQFVMSVPKSVTADTGMDVLTHAMESYVSVMASDYTRGLSLQAIKLTFEYLKSSVEKGDKVSREKMHNASTLAGMAFANAFLGIAHSIAHKIGGEYGIPHGRANAILLPHIIRYNAKDPQKHALFPKYEFFRADTDYADIAKFLGLKGNTTEALVESLAKAVYELGQSVGIEMNLKSQGVSEEELNESIDRMAELAFEDQCTTANPKEALISEIKDIIQTSYDYKQ

SEQ ID NO: 12267 - protein, 394 aa, Staphylococcus aureus
MNSIIELTDYYSSNNYAPLKLVITKGKGVKVWDTDGKQYIDCISGFSVANQGHCHPTIVKAMTEQASKLSIISRVLYSDNLGKWEEKICHLAKKDKVLPLNSGTEAVEAAIKIARKWGSEVKGINDGQVEIIAMNNNFHGRTLGSLSLSNHDAYKAGFHPLLQGTTTVDFGDIEQLTQAISPNTAAIILEPIQGEGGVNMPPKGYIQAVRQLCDKHQILLIADEIQVGLGRTGKWFAMEWEQVVPDIYILGKALGGGLYPVSAVLANNDVMRVLTPGTHGSTFGGNPLAIAISTAALDVLKDEQLVEQSERLGSFLLKELLQLKHPSIKEIRGRGLFIGIELNTDAAPFVDQLIQRGILCKDTHRTIIRLSPPLVIDKEEINQIVAAFQDVFKN

SEQ ID NO: 12268 - protein, 451 aa, Staphylococcus aureus
MKKKLTFKENMFIGSMLFGLFFGAGNLIFPIHLGQAAGSNVFIANLGFLITAIGLPFLGIIAIGISKTSGLFEIASRVNKTYAYIFTIALYLVIGPFFALPRLATTSFEIAFSPFLSPKQITLYLFIFSFVFFVIAWFFARKPSRILEYIGKFLNPVFLVLLAIILLFAFIHPLGGISDAPISKQYQSNALFNGFLDGYNTLDALASLAFGIIIVATIKKLGIENPTDIAKETIKSGTISIIMMGIIYTLLAIMGTLSIGHFKLSENGGIALAQITQYYLGNYGIVLLSLIVMVACLKTAIGLITAFSETFEHLFPKMNYLAIATVVSFISFLFANVGLTKIIMYSVPVLMFLYPLAIALIVLTLFSSKFHHSKIIYQCTIFFTMIAALVDGLKASPEFISSTSFSQTLINFSQKYLPLSDIGMGWVVLSLIGFIIGFIIYKIKHRKIPQA

SEQ ID NO: 12269 - protein, 185 aa, Staphylococcus aureus
MINFNKTALVLIDLQQGILKMDYAPYTAEKVVQNANKLIDVFRKNNGFIVFVRVKFYDGKDALKPNSMVSLPPKEGDDYSRFHHLLDKRDGDFVIDKRQFSAFVGTDLDLQLRRRRIDTIVLGGVATHVGVDTTARDAYQLNYDQYFVTDMMSAQNETLHQFPIDNLFPIMGQTVTTSDILNILN

SEQ ID NO: 12270 - protein, 681 aa, Staphylococcus aureus
MRKKLFGQLQRIGKALMLPVAILPAAGLLLAIGTAIQGEALQHYLPFIQNGGVQNVAKLMTAAGSIIFENLPMIFALGVAIGLAGGDGVAAIAAFVGYIIMNKTMGDFLQVTPKNVTDPASGYASILGIPTLQTGVFGGIIIGALAAWCYNKFYNINLPSYLGFFAGKRFVPIMMATTSFILAFPMALIWPTIQTGLNAFSTGLLDSNTGVAVFLFGFIKRLLIPFGLHHIFHAPFWFEFGSWKNAAGEIIHGDQRIFIEQIREGAHLTAGKFMQGEFPVMMFGLPAAALAIYHSAKPENKKVVAGLMGSAALTSFLTGITEPLEFSFLFVAPLLFFIHAVLDGLSFLTLYLLDVHLGYTFSGGFIDYVLLGVLPNKTQWWLVIPVGLVYAVIYYFVFRFLIVKLKYKTPGREDKQSQAVTASATELPYAVLEAMGGKANIKHLDACITRLRVEVNDKSKVDVPGLKDLGASGVLEVGNNMQAIFGPKSDQIKHEMQQIMNGQVVENPTTMEDDKDETVVVAEDKSATSELSHIVHAPLTGEVTPLSEVPDQVFSEKMMGDGIAIKPSQGEVRAPFNGKVQMIFPTKHAIGLVSDSGLELLIHIGLDTVKLNGEGFTLHVEEGQEVKQGDLLINFDLDYIRNHAKSDITPIIVTQGNITNLDFKQGEHGNISFGDQLFEAK

SEQ ID NO: 12271 - protein, 346 aa, Staphylococcus aureus
MYLGQPLDEAYIKRMIKQGYQMIFTSVQIPEEDDETKYHYFTKLLNLLKHEQVTYLIDANPSILTPSFYEHLRQYDAQFMIRIDHSTSIEAIEAIMAQGLKCCLNASIISRELLTSLHQQLNDFTLLSFCHNYYPRPDTGLSVDLVNKKNELIYQFNPKAQIYGFIVGSGLRGPLHKGLPTIEATRHSHPVVAAKLLQETGVSEVLVGDSLIEMRQAKQLIDFCKHRHFTLCIEEVFDTTVTYLFDMCHKVRPDNPENVIRSETSRQICPHSIQPQFTTQRRIGSVTVDNLNNGRYQGEMQIVRQTLSAHDNVNVVAQIIKEDLPLLSCIEPNDTFDFQKTRECKK

SEQ ID NO: 12272 - protein, 484 aa, Staphylococcus aureus
MTKEQQLAERIIAAVGGMDNIDSVMNCMTRVRIKVLDENKVDDQELRHIDGVMGVIHDERIQVVVGPGTVNKVANHMAELSGVKLGDTIPHNHNDSEKMDYKSYAADKAKANKEAHKAKQKNGKLNKVLKSIANIFIPLIPAFIGAGLIGGIAAVLSNLMVAGYISGAWITQLITVFNVIKDGMLAYLAIFTGINAAKEFGATPGLGGVIGGTTLLTGIAGKNILMNVFTGEPLQPGQGGIIGVIFAVWILSIVEKRLHKIVPNAIDIIVTPTIALLIVGLLTIFIFMPLAGFVSDSLVSVVNGIISIGGVFSGFIIGASFLPLVMLGLHHIFTPIHIEMINQSGATYLLPIAAMAGAGQVGAALALWVRCKRNTTLRNTLKGALPVGFLGIGEPLIYGVTLPLGRPFLTACIGGGIGGAVIGGIGHIGAKAIGPSGVSLLPLISDNMYLGYIAGLLAAYAGGFVCTYLFGTTKAMRQTDLLGD

SEQ ID NO: 12273 - protein, 929 aa, Staphylococcus aureus
MAYQSEYALENEMMNQLEQLGYERVTIRDNKQLLDNFRTILNERHADKLEGNPLTDKEFQRLLTMIDGKSIFESARILRDKLPLRRDDESEIYLSFLDTKSWCKNKFQVTNQVSVEDTYKARYDVTILINGLPLVQVELKRRGIDINEAFNQVKRYRKQNYTGLFRYIQMFIISNGVETRYFSNNDSELLKSHMFYWSDKQNNRINTLQSFAESFMRPCQLAKMISRYMIINETDRILMAMRPYQVYAVEALIQQATETGNNGYIWHTTGSGKTLTSFKASQILSQQDDIKKVIFLVDRKDLDSQTEEEFNKFAKGAVDKTFNTSQLVRQLNDKSLPLIVTTIQKMAKAIQGNAHLLEQYKTNKVVFIIDECHRSQFGDMHRLVKQHFKNAQYFGFTGTPRFPENSSQDGRTTADIFGRCLHTYLIRDAIHDGNVLGFSVDYINTFKNKALKAEDNSMVEAIDTEEVWLADKRVELVTRHITNNHDKYTRNRQYSSIFTVQSIHALIKYYETFKRLNKKLEQPLTVAGIFTFKPNEDDRDGEVPYHSREKLEKMISDYNKKFETNFSTDTTNEYFNHISKNVKKGVKDSKIDILIVVNMFLTGFDSKVLNTLYVDKNLMYHDLIQAYSRTNRVEKESKPFGKIVNYRDLKKETDDALRVFSQTNDTDTILMRSYEEYKKEFMDAYRELKMIVPTPHMVDDIQDEEELKRFVEAYRLLAKIILRLKAFDEFEFTIDEIGMDEQENEDYKSKYLAVYDQVKRATAEKNKVSILNDIDFEIEMMRNDTINVNYIMNILRQIDLEDKAEQRRNQEQIRRILDHADDPTLRLKRDLIREFIDNVVPSLNKDDDIDQEYVNFESIKKEAEFKGFAGERAIDEQALKTISNDYQYSGVVNPHHLKKMIGDLPLKEKRKARKAIESFVAETTEKYGV

SEQ ID NO: 12274 - protein, 254 aa, Staphylococcus aureus; identical to SEQ ID NO: 5434

SEQ ID NO: 12275 - protein, 372 aa, Staphylococcus aureus
MKLKRLFKTSSMTLVKKKLLTMPMAKREIIMFDDKILLITGGTGSFGNAVMKRFLDSNIKEIRIFSRDEKKQDDIRKKYNNSKLKFYIGDVRDSQSVETAMRDVDYVFHAAALKQVPSCEFFPVEAVKTNIIGTENVLQSAIHQNVKKVICLSTDKAAYPINAMGISKAMMEKVFVAKSRNIRSEQTLICGTRYGNVMASRGSVIPLFIDKIKAGEPLTITDPDMTRFLMSLEDAVELVVHAFKHAETGDIMVQKAPSSTVGDLATALLELFEADNAIEIIGTRHGEKKAETLLTREEYAQCEDMGDYFRVPADSRDLNYSNYVETGNEMITQSYEYNSDNTHILTVEEIKEKLLTLEYVRNELNDYKASMR

SEQ ID NO: 12276 - protein, 374 aa, Staphylococcus aureus; identical to SEQ ID NO: 5265

SEQ ID NO: 12277 - protein, 254 aa, Staphylococcus aureus
MYLDIKIIKKEELKMNKNVVIKSLAALTILTSVTGIGATLVEEVQQTAKAENNVTKIKDTNIFPYTGVVAFNSATGFVVGKNTILTNKHVSKNYKVGDRITAHPNSDKSNGGIYSIKKIINYPGKEDVSVIQVEERAIERGPKGFNFNDNVTPFKYAAGAKAGDRIKVIGYPHPYKNKYVLHESTGPVMSVEGSSIVYSAHTESGNSGSPVLNSNNELIGIHFASDVKNDDNRNAYGVYFTPEIKKFIAENIDK

SEQ ID NO: 12278 - protein, 253 aa, Staphylococcus aureus
MSITKHHEKQRSTKMNKNIIIKSIAALTILTSVTGVGTTMVEDIQQTAKAENSVKLITNTNVAPYSGVTWMGAGTGFVVGNHTIITNKHVTYHMKVGDEIKAHPNGFYNNGGGLYKVTKIVDYPGKEDIAVVQVEEKSTQPKGRKFKDFTSKFKIASEAKENESISIIGYPNPNGNKLQMYESTGKVLSVNGNIVTSDAVVQPGSSGSPILNSKREAIGVMYASDKPTGESTRSFAVYFSPEIKKFIADNLDK

SEQ ID NO: 12279 - protein, 518 aa, Staphylococcus aureus
MSITEKQRQQQAELHKKLWSIANDLRGNMDASEFRNYILGLIFYRFLSEKAEQEYADALSGEDITYQEAWADEEYREDLKAELIDQVGYFIEPQDLFSAMIRDIETQDFDIEHLATAIRKVETSTLGEESENDFIGLFSDMDLSSTRLGNNVKERTALISKVMVNLDDLPFVHSDMEIDMLGDAYEFLIGRFAATAGKKAGEFYTPQQVSKILAKIVTDGKDKLRHVYDPTCGSGSLLLRVGKETQVYRYFGQERNNTTYNLARMNMLLHDVRYENFDIRNDDTLENPAFLGHTFDAVIANPPYSAKWTADSKFENDERFSGYGKLAPKSKADFAFIQHMVHYLDDEGTMAVVLPHGVLFRGAAEGVIRRYLIEEKNYLEAVIGLPANIFYGTSIPTCILVFKKCRQQDDNVLFIDASNDFEKGKNQNHLSDAQVERIIDTYKRKETIDKYSYSATLQEIADNDYNLNIPRYVDTFEEEAPIDLDQVQQDLKNIDKEIAEIEQEINAYLKELGVLKDE

SEQ ID NO: 12280 - protein, 530 aa, Staphylococcus aureus; identical to SEQ ID NO: 5570

SEQ ID NO: 12281 - protein, 431 aa, Staphylococcus aureus
MDVLGLLSILIVRRSFLFSSQRENFRNINLKEQTMLNNKRLFTSESVTEGHPDKIADQVSDAILDAILKDDPNARVACETTVTTGMALIAGEISTTTYVDIPKVVRETIKEIGYTRAKYGYDYETMAILTAIDEQSPDIAQGVDKALEYRDKDSEEEIEATGAGDQGLMFGYATNETETYMPLAIYLSHQLAKRLSDVRKDGTLNYLRPDGKVQVTVEYDENDNPVRIDTIVVSTQHAEDVTLEQIQEDIKAHVIYPTVPENLINEQTKFYINPTGRFVIGGPQGDAGLTGRKIIVDTYGGYARHGGGCFSGKDPTKVDRSAAYAARYVAKNIVAAGLADQCEVQLAYAIGVAEPVSIAIDTFGTGKVSEGQLVEAVRKHFDLRPAGIIKMLDLKQPIYKQTAAYGHFGRTDVLFPWEKLDKVEELKDAVK

SEQ ID NO: 12282 - protein, 277 aa, Staphylococcus aureus
MEVKTFYNGNTMPQIGLGTFRVDNDENCMESVKYAIEQGYRSIDTAKVYGNEEQVGAGIRAGLESTGIAREDLFITSKLYFEDFGRENVAAAYEASLSRLGLKYLDLYLVHWPGTNEAVMVDTWKGMEDLYKNNKVKNIGVSNFEPEHLEALLAQVSIKPVINQVEYHPYLTQHKLKLYLAAQHIVMESWSPLMNAQILNDETIKDIAQELGKSPAQVVLRWNVQHGVVTIPKSVTPNRISENFQIFDFELSDEQMTRIDSLNQDKRIGPDPKTFEG

SEQ ID NO: 12283 - protein, 357 aa, Staphylococcus aureus
MRIFVYRGDHLSQFMDYAIQLANMVQGQTGVNPPVGAVVVKEGRIVGIGAHLRKGDKHAEVQALDMAQQNAEGATIYITLEPCSHFGSTPPCVNKIIDCKIAKVVYATKDNSLDTHGDDTLRDHGIEVECVDDERSSQLYQDFFKAKAKQLPQITVKVSASLDGKQANDNGQSQWITNKEVKQDVYKLRHRHDAVLTGRRTVELDDPQYTTRIQDGKNPIKVILSKSGNIHFNQQIYQDESTPIWIYTENPNLTTNQTHIEIIYLKSCDLTTILHNLYKRGVGTLLVEAGPTTTSEFLQSNYIDEFILYYAPKLIGGSGNYQFYQTNDVIEIPDANQFEIVHSELLNQNVKLTLRKK

SEQ ID NO: 12284 - protein, 210 aa, Staphylococcus aureus; identical to SEQ ID NO: 5378

SEQ ID NO: 12285 - protein, 393 aa, Staphylococcus aureus
MQFDNIDSALMALKNGETIIVVDDENRENEGDLVAVTEWMNDNTINFMAKEARGLICAPVSKDIAQRLDLEQMVDDNSDIFGTQFTVSIDHVDTTTGISAYERTLTAKKLIDPSSEAKDFNRPGHLFPLVAQDKGVLARNGHTEAAVDLAKLTGAKPAGVICEIMNDDGTMAKGQDLQKFKEKHQLKMITIDDLIEYRKKLEPEIEFKAKVKMPTDFGTFDMYGFKATYTDEEIVVLTKGAIRQHENVRLHSACLTGDIFHSQRCDCGAQLESSMKYINEHGGMIIYLPQEGRGIGLLNKLRAYELIEQGYDTVTANLALGFDEDLRDYHIAAQILKYFNIEHINLLSNNPSKFEGLKQYGIDIAERIEVIVPETVHNHDYMETKKIKMGHLI

SEQ ID NO: 12286 - protein, 805 aa, Staphylococcus aureus
MLNYNHNQIEKKWQDYWDENKTFKTNDNLGQKKFYALDMFPYPSGAGLHVGHPEGYTATDIISRYKRMQGYNVLHPMGWDAFGLPAEQYALDTGNDPREFTKKNIQTFKRQIKELGFSYDWDREVNTTDPEYYKWTQWIFIQLYNKGLAYVDEVAVNWCPALGTVLSNEEVIDGVSERGGHPVYRKPMKQWVLKITEYADQLLADLDDLDWPESLKDMQRNWIGRSEGAKVAFDVDNAEGKVEVFTTRPDTIYGASFLVLSPEHALVNSITTDEYKEKVKAYQTEASKKSDLERTDLAKDKSGVFTGAYAINPLSGEKVQIWIADYVLSTYGTGAIMAVPAHDDRDYEFAKKFDLPIIEVIEGGNVEEAAYTGEGKHINSGELDGLENEAAITKAIQLLEQKGAGEKKVNYKLRDWLFSRQRYWGEPIPVIHWEDGTMTTVPEEELPLLLPETDEIKPSGTGESPLANIDSFVNVVDEKTGMKGRRETNTMPQWAGSCWYYLRYIDPKNENMLADPEKLKHWLPVDLYIGGVEHAVLHLLYARFWHKVLYDLGIVPTKEPFQKLFNQGMILGEGNEKMSKSKGNVINPDDIVQSHGADTLRLYEMFMGPLDAAIAWSEKGLDGSRRFLDRVWRLMVNEDGTLSSKIVTTNNKSLDKVYNQTVKKVTEDFETLGFNTAISQLMVFINECYKVDEVYKPYIEGFVKMLAPIAPHIGEELWSKLGHEESITYQPWPTYDEALLVDDEVEIVVQVNGKLRAKIKIAKDTSKEEMQEIALSNDNVKASIEGKDIMKVIAVPQKLVNIVAK

SEQ ID NO: 12287 - protein, 422 aa, Staphylococcus aureus
MYQTIIIGGGPSGLMAAVAASEQSNNVLLIEKKKGLGRKLKISGGGRCNVTNRLPYAEIIKNIPGNGKFLYSPFSIFDNESIIDFFESRGVKLKEEDHGRMFPVSNKAQDVVDTLVTTIERQHVTIKEEEAVSRIEVNTDQTFTVHTQSSSYVSHSLVIATGGTSVPQTGSTGDGYKFAQDLGHTITELFPTEVPITSAEPFIKSNRLKGLSLKDVELSVLKKNGKKRISHQMDMLFTHFGISGPATLRCSQFVYKEQKNQKTQHISMAIDAFPELNHEQLKQHITSLLSDTPDKIIKNSLHGLIEERYLLFMLEQAGIDENTTSHHLSNQQLNDLVNMFKGFVFKVNGTLPIDKAFVTGGGVSLKEIQPKTMMSKLVPGLFLCGEVLDIHGYTGGYNITSALVTGHVAGLYAGHYSHASME

SEQ ID NO: 12288 - protein, 553 aa, Staphylococcus aureus
MSESKEMVRGTFLITISILITKVLGVLFIIPFNYLIGGQENMAPFTYAYAPYNIAIAVATAGVPLAASKYVAKYNAIGAYKVSQKFYKSSFIVMSITGVLGFLVLYFLAPYISELTLARNVHDKNGWSVDDITWIIRIISMVVIFIPVLATWRGIFQGYKSMGPTAVSEVTEQIARVIFILIGSYLVLNVFDGSILLANGIATFAAAVGAIIGIFTLWYYWRKRKHNIDRMVESDYTDIDVSYGKMYKEIIAYSIPFVIVSLNYPLFNLVDQFTHNGALSLVGIPSQLQDIFFNMLNMSTNKIVMIPTSLSAGFAVSLIPYITKTFAEGRLHEMHHQIRTSIGVLMFITVPASIGIMALAQPLFTVFYGYDPIVLGHDPNHDGSRLLFYYAPVAILISLLSVTASMLQGIDKQKLTVYVILASVVIKLALNYPLIMLFHTPGAILSTSIALLFAIGCNFYILKKYAKFKFSYSWIHFAKIFLYSFIMMLGVELVFFLANLFLEPTKLGYLIIIILGVTVGILIYGTITIKTRLADEFLGEIPEKLRRRVRFLR

SEQ ID NO: 12289 - protein, 231 aa, Staphylococcus aureus
MRIDKFLANMGVGTRNEVKQLLKKGLVNVNEQVIKSPKTHIEPENDKISVRGELIEYVENVYIMLNKPKGYISATEDHHSKTVIDLIPEYQHLNIFPVGRLDKDTEGLLLITNDGDFNHELMSPNKHVSKKYEVISANPITEDDIQAFKEGVTLSDGKVKPAILTYIDNQTSHVTIYEGKYHQVKRMFHSIQNEVLHLRRIKIADLELDSNLDSGEYRLLTENDFDKLNYK

SEQ ID NO: 12290 - protein, 469 aa, Staphylococcus aureus
MWKEKVQQYEDQIINDLKGLLAIESVRDDAKASEDAPVGPGPRKALDYMYEIAHRDGFTTHDVDHIAGRIEAGKGNDVLGILCHVDVVPAGDGWDSNPFEPVVTEDAIIARGTLDDKGPTIAAYYAIKILEDMNVDWKKRIHMIIGTDEESDWKCTDRYFKTEEMPTLGFAPDAEFPCIHGEKGITTFDLVQNKLTEDQDEPDYELITFKSGERYNMVPDHAEARVLVKENMTDVIQDFEYFLEQNHLQGDSTVDSGILVLTVEGKAVHGMDPSIGVNAGLYLLKFLASLNLDNNAQAFVAFSNRYLFNSDFGEKMGMKFHTDVMGDVTTNIGVITYDNENAGLFGINLRYPEGFEFEKAMDRFANEIQQYGFEMKLGKVQPPHYVDKNDPFVQKLVTAYRNQTNDMTEPYTIGGGTYARNLDKGVAFGAMFSDSEDLMHQKNEYITKKQLFNATSIYLEAIYSLCVEE

SEQ ID NO: 12291 - protein, 266 aa, Staphylococcus aureus
MDELEQFYQLGWTLDSAGGASGEAYMAEQDGQKLFLKRNSNPFIAALSAEGIVPKLVWTKRIETGEVVTAQHWKNGRELSSNEMKQTRVAHLLKKIHNSRPLLSMLKRMEMEPITPEIMLNKINASLSREVLTHHIVRKSLTYLEEHMPSLDSRFFTVVHGDVNHNNWLLSDRDELFLVDWEGAMIADPAIDIGMLLYNYVPQQQWSEWLETYGVQESLNLNKRMKWYTVIQSIGLVQWYEEQKRYKDMNTWLKFLNEVMNSNMFI

SEQ ID NO: 12292 - protein, 198 aa, Staphylococcus aureus
MNLFYNPKYVGDVAFLQIEPIEGELNYNKKGNVVEITNEGNVVGYNIFEISKDITIEETGHIKLTDELVNVFQKRISEAGFDYKLNADLSPKFVVGYVETKDKHPDADKLSVLNVNVGNDTLQIVCGAPNVEAGQKVVVAKVGAVMPSGMVIKDAELRGVASSGMICSMKELNLPNAPEEKGIMVLNDSYEIGQAFFE

SEQ ID NO: 12293 - protein, 444 aa, Staphylococcus aureus
MSKEFYIMTHYHFVGIKGSGMSSLAQIMHDLGHEVQGSDIENYVFTEVALRNKGIKILPFGANNIKEDMVVIQGNAFASSHEEIVRAHQLKLDVVSYNDFLGQIIDQYTSVAVTGAHGKTSTTGLLSHVMNGDKKTSFLIGDGTGMGLPESDYFAFEACEYRRHFLSYKPDYAIMTNIDFDHPDYFKDINDVFDAFQEMAHNVKKGIIAWGDDEHLRKIEADVPIYYYGFKDSDDIYAQNIQITDKGTAFDVYVDGEFYDHFLSPQYGDHTVLNALAVIAISYLEKLDVTNIKEALETFGGVKRRFNETTIANQVIVDDYAHHPREISATIETARKKYPHKEVVAVFQPHTFSRTQAFLNEFAESLSKADRVFLCEIFGSIRENTGALTIQDLIDKIEGASLINEDSINVLEQFDNAVVLFMGAGDIQKLQNAYLDKLGMKNAF

SEQ ID NO: 12294 - protein, 454 aa, Staphylococcus aureus; identical to SEQ ID NO: 5298

SEQ ID NO: 12295 - protein, 378 aa, Staphylococcus aureus
MVKVMKVLVAMDEFHGIISSYQANRYVEEAVASQIETADVVQVPLFNGRHELLDSVFLWQSGQKYRIPVHDADMNEVEGVYGQTDTGMTVIEGNLFLKGKKPIVERTSYGLGEMINHALDNDAKHVVISLGGIDSFDAGAGMLQALGAQFYDDEGRVVDMRQGAGVIKYIRRMDMSNLHPKMETARIQVMSDFSSRLYGKQSEIMQTHDAHQLNHNQAAEIDNLIWYFSELFKSELKIAIGPVERGGAGGGIAAVLNGLYQAEILTSHALVDQLTHLENLVEQADLIIFGEGLNENDQLLETTTLRIAELCHKHQKVAIAICATAEKFDLFESQGVTAMFNTFIDMPETYTDFKMGLQIRHYTVQSLKLLKTHFNVEI

SEQ ID NO: 12296 - protein, 408 aa, Staphylococcus aureus
MKNQLIDRLTRYTTIDTQSDPKSTTTPSTEKQWDLLHLLDKELQQLGLPTDLDENGYLFATLESNIDADVPTVGFLAHVDTSPDFNASNVKPQIIENYDGKPYKLGNTKRVLDPKVFPELNSLVGHTLMVTDGTSLLGADDKAGIVEIMEAICYLKEHPEIKHGTIRIGFTPDEEIGRGPHKFDVDRFNADFAYTMDGSQYGELQYESFNAAEAVITCHGVNVHPGSAKNAMVNAIRLGEQFDSLLPDSEVPERTEGYEGFYHLMNFEGTVEKATLQYIIRDHDKKQFELRKKRILEIRDDINAHFDNYPVKVDISDQYFNMAEKILPLPHIIDIPKRVFAKLDIPANTEPIRGGTDGSQLSFMGLPTPNIFTGCGNFHGPYEYASIDVMEKAVQVIIGIVEDIAENN

SEQ ID NO: 12297 - protein, 265 aa, Staphylococcus aureus
MNRLHGQQVKIGYGDNTIINKLDVEIPDGKVTSIIGPNGCGKSTLLKALSRLLAVKEGEVFLDGENIHTQSTKEIAKKIAILPQSPEVADGLTVGELVSYGRFPHQKGFGRLTAEDKKEIDWAMEVTGTDTFRHRSINDLSGGQRQRVWIAMALAQRTDIIFLDEPTTYLDICHQLEILELVQKLNQEQGCTIVMVLHDINQAIRFSDHLIAMKEGDIIATGSTEDVLTQEILEKVFNIDVVLSKDPKTGKPLLVTYDLCRRAYS

SEQ ID NO: 12298 - protein, 271 aa, Staphylococcus aureus
MNKEGLQMNVSVNIKNVTKEYRIYRTNKERMKDALIPKHKNKTFFALDDISLKAYEGDVIGLVGINGSGKSTLSNIIGGSLSPTVGKVDRNGEVSVIAISAGLSGQLTGIENIEFKMLCMGFKRKEIKAMTPKIIEFSELGEFIYQPVKKYSSGMRAKLGFSINITVNPDILVIDEALSVGDQTFAQKCLDKIYEFKEQNKTIFFVSHNLGQVRQFCTKIAWIEGGKLKDYGELDDVLPKYEAFLNDFKKKSKAEQKEFRNKLDESRFVIK

SEQ ID NO: 12299 - protein, 188 aa, Staphylococcus aureus
MKRIAVYCGASKGHDPSYVQKAYDLGKYFAEQGYELVFGAGSIGIMGAIQDGVLDHGGKAIGVMPKMLDEHEITSQRLTELILVDSMHERKNKMAELADAFVMAPGGAGSLEEFFEMYSWAQIGIHEKPIAIYNINGFFNPLQTMIDHMIEEGFIDPKYRALAPLCDTKESLIESILNFKPLGTRSYD

SEQ ID NO: 12300 - protein, 306 aa, Staphylococcus aureus
MIYTVTFNPSIDYVIFTNDFKIDGLNRATATYKFAGGKGINVSRVLKTLDVESTALGFAGGFPGKFIVDTLNNSAIQSNFIEVDEDTRINVKLKTGQETEINAPGPHITSTQFEQLLQQIKNTTSDDIVIVAGSVPSSIPSDAYAQIAQITAQTGAKLVVDAEKELAESVLPYHPLFIKPNKDELEVMFNTTVNSDADVIKYGRLLVDKGAQSVIVSLGGDGAIYIDKEISIKAVNPQGKVVNTVGSGDSTVAGMVAGIASGLTIEKAFQQAVACGTATAFDEDLATRDAIEKIKSQVTISVLDGE

SEQ ID NO: 12301 - protein, 657 aa, Staphylococcus aureus
MKIMRVTELLTKDTIAMDLMANDKNGVIDELVNQLDKAGKLSDVASFKEAIHNRESQSTTGIGEGIAIPHAKVAAVKSPAIAFGKSKEGVDYQSLDMQPAHLFFMIAAPEGGAQTHLDALAKLSGILMDENVREKLLHASSPEEVLAIIDHADDEATKEEEAEAEAQQVAAVEANQDTNGSNEPYVLAVTACPTGIAHTYMARDALKKQADKMGIKIKVETNGSSGIKNHLTEQDIKNATGIIVAADVHVETDRFDGKNVVEVPVADGIKRPEELINKALDTSRKPFVARDGQRKGNSNDSQEKLSPGKAFYKHLMNGVSNMLPLVISGGILMAIVFLFGANSFNPKSSEYNAFAEQLWNIGSKSAFALIIPILSGFIARSIADKPGFASGLVGGMLAISGGSGFIGGIIAGFLAGYLTQGVKAMTRKLPQALEGLKPTLIYPLLTVTATGLLMIYVFNPPASWLNHLLLDGLNNLSGSNIVLLGLVIGAMMAIDMGGPFNKAAYVFATGALIEGNAAPITAAMIGGMIPPLAIATAMLIFRRKFTKEQRGSIIPNYVMGMSFITEGAIPFAAADPLRVIPSMMIGSGIGGAIALGLGSRITAPHGGIIVIVGTDGAHLLQTLIALLVGTLVSALIYGLIKPKLTETEIEASKSMDE

SEQ ID NO: 12302 - protein, 393 aa, Staphylococcus aureus
MSELIIYNGKVYTEDGKIDNGYIHVKDGQIVAIGEVNDKAAIDNDTTNKIQVIDAKGHHVVPGFIDIHIHGGYGQDAMDGSHDGLKYLSENLLSEGTTSYLATTMTQSTDKIDKALINIAKYEVEQDVHNAAEIVGIHLEGPFISENKVGAQHPQYVVRPFIDKIKHFQETANGLIKIMTFAPEVEGAKEALETYKDDIIFSIGHTVATYEEAVEAVERGAKHVTHLYNAATPFQHREPGVFGAAWLNDALHTEMIVDGTHSHPASVAIAYRMKGNERFYLITDAMRAKGMPEGEYDLGGQKVTVQSQQARLANGALAGSILKMNHGLRNLISFTGDTLDHLWRVTSLNQAIALGIDDRKGSIKVNKDADLVILDDDMNVKSTIKQGKVHTFS

SEQ ID NO: 12303 - protein, 132 aa, Staphylococcus aureus; identical to SEQ ID NO: 5399

SEQ ID NO: 12304 - protein, 646 aa, Staphylococcus aureus
MSSQKKKISLFAFFLLTVITITLKTYFSYYVDFSLGVKGLVQNLILLMNPYSLVALVLSVFLFFKGKKAFWFMFIGGFLLTFLLYANVVYFRFFSDFLTFSTLNQVGNVESMGGAVSASFKWYDFVYFIDTLVYLFILIFKTKWLDTKAFSKKFVPVVMAASVALFFLNLAFAETDRPELLTRTFDHKYLVKYLGPYNFTVYDGVKTIENNQQKALASEDDLTKVLNYTKQRQTEPNPEYYGVAKKKNIIKIHLESFQTFLINKKVNGKEVTPFLNKLSSGKEQFTYFPNFFHQTGQGKTSDSEFTMDNSLYGLPQGSAFSLKGDNTYQSLPAILDQKQGYKSDVMHGDYKTFWNRDQVYKHFGIDKFYDATYYDMSDKNVVNLGLKDKIFFKDSANYQAKMKSPFYSHLITLTNHYPFTLDEKDATIEKSNTGDATVDGYIQTARYLDEALEEYINDLKKKGLYDNSVIMIYGDHYGISENHNNAMEKLLGEKITPAKFTDLNRTGFWIKIPGKSGGINNEYAGQVDVMPTILHLAGIDTKNYLMFGTDLFSKGHNQVVPFRNGDFITKDYKYVNGKIYSNKNNELITTQPADFEKNKKQVEKDLEMSDNVLNGDLFRFYKNPDFKKVNPSKYKYETGPKANSKK

SEQ ID NO: 12305 - protein, 627 aa, Staphylococcus aureus
MGMEAYKIEHLNKSYADKTIFDNLDLSISEGEKIGLVGINGTGKSTLLKVIGGIDDDFTANVMHPNQYRIRYSSQKQDLNEDMTVFDAVLSSDTTTLRIIKQYEQAVQAYADDQSDKLFKRMMDAQDAMDQHDAWDYNAEIKTILSKLGIHDTTKYIKELSGGQQKRVVLAKTLIEQPDLLLLDEPTNHLDFESISWLINYVKQYPHTVLFVTHDRYFLNEVSTRIIELNRGKLASYPGNYESYIEMRAEREVTIQKQQQKQRALYKEELAWMRAGAKARTTKQQARINRFNDLENEVNQRYKDDKGELNLAYSRLGKQVFELEDLSKAINDKVLFEHLTEIIQKGERIGVVGPNGAGKTTLLNILSGEDQQFEGKLKTGQTVKVAYFKQTDETLDRDIRMIDYLREESEIAKEKDGTSVSITQLLERFLFPSATHGKKVYKLSGGEQKRLYLLRLLVHQPNVLLLDEPTNDLDTETLTILEDYIHTFGGTMITVSHDRYFLNKVAQSYWFIHDGQIEKIIGTFEDYESYKKSLDKNKSTLKQQSKSSTTVRKKNGLSYKEKLEYEQLMKRIEQAEVRMEEIDVLMIEASADYGKIKELNEEKEQLEIQYDLDITRWSELEEIKEQQ

SEQ ID NO: 12306 - protein, 593 aa, Staphylococcus aureus
MMQQTLSHYFGYETFRPGQEEIISKVLDHRNVLGVLPTGGGKSICYQVPGLLLGGTTIVISPLISLMKDQVDQLKAMGIQAAFLNSSLTQKEQQRIEKALSNGEIQFLYVAPERFENRYFLNMLQRIKIHLVAFDEAHCISKWGHDFRPSYQNIISKVFTLPQDFTIIALTATATVEVQQDIREKLNIAQTDQIKTSTKRRNLIFKVNPTYQRQKFILDYIKTHDEDAGIIYCSTRKQVEELQEALESQKIESVIYHAGLSNKEREEAQNDFLFDRVKVVVATNAFGMGIDKSNVRFVIHYNMPGDLESYYQEAGRAGRDGLKSECILLFSERDINLHEYFITVSQADDDYKDKMGEKLTKMIQYTKTKKCLEATIVHYFEPNEKLEECEQCSNCVQQDKSYNMTQEAKMIISCIARMKQQESYSVIIQVLRGESTDYIKYKGYDQISTHGLMKGYTTSELSHLIDELRFKGFLNENDEILMCDTSIKKLLSNEVEVFTTPFKQKATEKVFINTVEGVDRVLFSQLVEVRKKLSDKLTIAPVSIFSDYTLEEFAKRKPASKQDMINIDGVGSYKLKHYCPAFLETIQNYKAKV

SEQ ID NO: 12307 - protein, 452 aa, Staphylococcus aureus
MYLNIFHYDVEEFLDTKKVNADEDLRLSTISTGLIVPSKFFDLAKEGKDFYMFAPHTVKEEYGVTLDDIDLEKYYDDMVANPNVEKKKKNAREMLNLIAQTQLQSGYPYLMFKDNANRVHPNSNIGQIKMSNLCTEIFQLQETSIINDYGIEDEIKRDISCNLGSLNIVNVMESGKFRDSVHSGMDALTVVSDVANIQNAPGVRKANSELHSVGLGVMNLHGYLAKNKIGYESEEAKDFANIFFMMMNFYSIERSMEIAKERGIKYQDFEKSDYANGKYFEFYTTQEFEPQFEKVRELFDGMAIPTSEDWKKLQQDVEQYGLYHAYRLAIAPTQSISYVQNATSSVMPIVDQIERRTYGNAETFYPMPFLSPQTMWYYKSAFNTDQMKLIDLIATIQTHIDQGISTILYVNSEISTRELARLYVYAHYKGLKSLYYTRNKLLSVEECTSCSI

SEQ ID NO: 12308 - protein, 323 aa, Staphylococcus aureus; identical to SEQ ID NO: 5445

SEQ ID NO: 12309 - protein, 307 aa, Staphylococcus aureus
MINKDIYQALQQLIPNEKIKVDEPLKRYTYTKTGGNADFYITPTKNEEVQAVVKYAYQNEIPVTYLGNGSNIIIREGGIRGIVISLLSLDHIEVSDDAIIAGSGAAIIDVSRVARDYALTGLEFACGIPGSIGGAVYMNAGAYGGEVKDCIDYALCVNEQGSLIKLTAKELELDYRNSIIQKEHLVVLEAAFTLAPGKMTEIQAKMDDLTERRESKQPLEYPSCGSVFQRPPGHFAGKLIQDSNLQGHRIGGVEVSTKHAGFMVNVDNGTATDYENLIHYVQKTVKEKFGIELNREVRIIGEHPKES

SEQ ID NO: 12310 - protein, 215 aa, Staphylococcus aureus
MTLDENIINPFVQLVHPKKEKYLPQFFYEEEMEALFKTVEEDTSKSLRDRVILELLYATGIRVSELVNIKKQDIDFYANGVTVLGKGSKERFVPFGAYCRQSIENYLEHFKPIQSCNHDFLIVNMKGEAITERGVRYVLNDIVKRTAGVSEIHPHKLRHTFATHLLNQGADLRTVQSLLGHVNLSTTGKYTHVSNQQLRKVYLNAHPRAKKENET

SEQ ID NO: 12311 - protein, 181 aa, Staphylococcus aureus
MSNTTLHATTIYAVRHNGKAAMAGDGQVTLGQQVIMKQTARKVRRLYEGKVLAGFAGSVADAFTLFEKFETKLQQFSGNLERAAVELAQEWRGDKQLRQLEAMLIVMDKDAILVVSGTGEVIAPDDDLIAIGSGGNYALSAGRALKRHASHLSAEEMAYESLKVAADICVFTNDNIVVETL

SEQ ID NO: 12312 - protein, 319 aa, Staphylococcus aureus
MIKIALSIILKELYNMSNVLELTIPASTANLGVGFDSIGMALDKFLHLSVKETSGTKWEYIFHDDASKQLPTDETNFIYHVAQQVAAKYSVDLPNLCIEMRSDIPLARGLGSSASALVGAIYIANYFGDIQLSKHEVLQLATEIEGHPDNVAPTIYGGLIAGYYNDVSKETSVAHIDIPDVDVIVTIPTYELKTEASRRALPQKLTHSEAVKSSAISNTMICALAQHNYELAGKLMQQDGFHEPYRQHLIAEFDEVKTIASQHNAYATVISGAGPTILIFSRKENSGELVRALNRNVVTCHSELVDINVSGVKERIVYQ

SEQ ID NO: 12313 - protein, 267 aa, Staphylococcus aureus
MTNYKVVVLDMDDTLLNSDNVISEETANYLTAIQDEGYYVVLASGRPTEGMIPTARDLKLPEHHSYIISYNGSKTINMTNEEVEVSKSIGKQDFDEIVDYCRERGFFVLTYHDGQIIYDSEHEYMNIEAELTGLPMKRVDDIKAYIQGDVPKVMGVDYVANITEARIDLNGVFNDNVDATTSKPFFLEFMAKDVSKGNAIKALCHKLGYSVDQVIAFGDSMNDKSMFEVAGLAIAMGNASDELKQYADEITLDHNENGIPHALKKLL

SEQ ID NO: 12314 - protein, 255 aa, Staphylococcus aureus
MAVISMKQLLEAGVHFGHQTRRWNPKMKKYIFTERNGIYIIDLQKTVKKVDEAYNFLKQVSEDGGQVLFVGTKKQAQESVKSEAERAGQFYINQRWLGGLLTNYKTISKRIKRISEIEKMEEDGLFEVLPKKEVVELKKEYDRLIKFLGGIRDMKSMPQALFVVDPRKERNAIAEARKLNIPIVGIVDTNCDPDEIDYVIPANDDAIRAVKLLTAKMADAILEGQQGVSNEEVAAEQNIDLDEKEKSEETEATEE

SEQ ID NO: 12315 - protein, 85 aa, Staphylococcus aureus
MATISAKLVKELREKTGAGMMDCKKALTETDGDIDKAIDYLREKGIAKAAKKADRIAAEGLVHVETKGNDAVIVEINSETDSCCS

SEQ ID NO: 12316 - protein, 182 aa, Staphylococcus aureus
METTLPNGKSVDERIKEAISTIGEKLSVRRFAIRTKTDNDAFGAYLHMGGRIGVLTVVEGSTDEEAARDVAMHIAAINPKYVSSEQVSEEEINHEREVLKQQALNEGKPENIVEKMVEGRLRKYLQEICAVDQDFVKNPDVTVEAFLKTKGGKLVDFVRYEVGEGMEKREENFADEVKGQMK

SEQ ID NO: 12317 - protein, 184 aa, Staphylococcus aureus; identical to SEQ ID NO: 5242

SEQ ID NO: 12318 - protein, 267 aa, Staphylococcus aureus
MTEMIRLGGKTMFKKLINKKNTINNYNEELDSSNIPEHIAIIMDGNGRWAKKRKMPRIKGHYEGMQTIKKITRVASDIGVKYLTLYAFSTENWSRPESEVNYIMNLPVNFLKTFLPELIEKNVKVETIGFTDKLPKSTIEAINNAKEKTANNTGLKLIFAINYGGRAELVHSIKNMFDELHQQGLNSDIIDETYINNHLMTKDYPDPELLIRTSGEQRISNFLIWQVSYSEFIFNQKLWPDFDEDELIKCIKIYQSRQRRFGGLSEE

SEQ ID NO: 12319 - protein, 260 aa, Staphylococcus aureus
MKVRMLTAIIALIVFLPILLKGGLVLMIFANILALIALKELLNMNMIKFVSVPGLISAVGLIIIMLPQHAGPWVQVIQLKSLIAMSFIVLSYTVLSKNRFSFMDAAFCLMSVAYVGIGFMFFYETRSEGLHYILYAFLIVWLTDTGAYLFGKMMGKHKLWPVISPNKTIEGFIGGLFCSLIVPLAMLYFVDFNMNVWILLGVTLILSLFGQLGDLVESGFKRHFGVKDSGRILPGHGGILDRFDSFMFVLPLLNILLIQS

SEQ ID NO: 12320 - protein, 567 aa, Staphylococcus aureus
MKQSKVFIPTMRDVPSEAEAQSHRLLLKSGLIKQSTSGIYSYLPLATRVLNNITAIVRQEMERIDSVEILMPALQQAELWEESGRWGAYGPELMRLQDRHGRQFALGPTHEELVTSIVRNELKSYKQLPMTLFQIQSKFRDEKRPRFGLLRGREFIMKDAYSFHADEESLDQTYQDMYQAYSRIFERVGINARPVVADSGAIGGSHTHEFMALSAIGEDTIVYSKESDYAANIEKAEVVYEPNHKHTTVRSLEKIETPNVKTAQELADFLGRPVDEIVKTMIFKVDGEYIMVLVRGHHEINDIKLKSYFGTDNIELATQDEIVNLVGANPGSLGPVIDKEIKIYADNFVQDLNNLVVGANEDGYHLINVNVGRDFNVDEYGDFRFILEGEKLSDGSGVAHFAEGIEVGQVFKLGTKYSESMNATFLDNQGKAQPLIMGCYGIGISRTLSAIVEQNHDDNGIVWPKSVTPFDLHLISINPKKDDQRELADALYAEFNTKFDVLYDDRQERAGVKFNDADLIGLPLRIVVGKRASEGIVEVKERLTGDSEEVHIDDLMTVITNKYDNLK

SEQ ID NO: 12321 - protein, 1442 aa, Staphylococcus aureus
MVIVLAMTEQQKFKVLADQIKISNQLDAEILNSGELTRIDVSNKNRTWEFHITLPQFLAHEDYLLFIHAIEQEFKDIANVTCRFTVTNGTNQDEHAIKYFGHCIDQTALSPKVKGQLKQKKLIMSGKVLKVMVSNDIERNHFDKACNGSLIKAFRNCGFDIDKIIFETNDNDQEQNLASLEAHIQEEDEQSARLATEKLEKMKAEKAKQQDNNESAVDKCQIGKPIQIENIKPIESIIEEEFKVAIEGVIFDINLKELKSGRHIVEIKVTDYTDSLVLKMFTRKNKDDLEHFKALSVGKWVRAQGRIEEDTFIRDLVMMMSDIEEIKKATKKDKAEEKRVEFHLHTAMSQMDGIPNIGAYVKQAADWGHPAIAVTDHNVVQAFPDAHAAAEKHGIKMIYGMEGMLVDDGVPIAYKPQDVVLKDATYVVFDVETTGLSNQYDKIIELAAVKVHNGEIIDKFERFSNPHERLSETIINLTHITDDMLVDAPEIEEVLTEFKEWVGDAIFVAHNASFDMGFIDTGYERLGFGPSTNGVIDTLELSRTINTEYGKHGLNFLAKKYGVELTQHHRAIYDTEATAYIFIKMVQQMKELDVLNHNEINKKLSNEDAYKRARPSHVTLIVQNQQGLKNLFKIVSASLVKYFYRTPRIPRSLLDEYREGLLVGTACDEGELFTAVMQKDQSQVEKIAKYYDFIEIQPPALYQDLIDRELIRDTETLHEIYQRLIHAGDTAGIPVIATGNAHYLFEHDGIARKILIASQPGNPLNRSTLPEAHFRTTDEMLNEFHFLGEEKAHEIVVKNTNELADRIERVVPIKDELYTPRMEGANEEIRELSYANARKLYGEDLPQIVIDRLEKELKSIIGNGFAVIYLISQRLVKKSLDDGYLVGSRGSVGSSFVATMTEITEVNPLPPHYICPNCKTSEFFNDGSVGSGFDLPDKTCETCGAPLIKEGQDIPFETFLGFKGDKVPDIDLNFSGEYQPNAHNYTKVLFGEDKVFRAGTIGTVAEKTAFGYVKGYLNDQGIHKRGAEIDRLVKGCTGVKRTTGQHPGGIIVVPDYMDIYDFTPIQYPADDQNSAWMTTHFDFHSIHDNVLKLDILGHDDPTMIRMLQDLSGIDPKTIPVDDKEVMQIFSTPESLGVTEDEILCKTGTFGVPEFGTGFVRQMLEDTKPTTFSELVQISGLSHGTDVWLGNAQELIKTGICDLSSVIGCRDDIMVYLMYAGLEPSMAFKIMESVRKGKGLTEEMIETMKENEVPDWYLDSCLKIKYMFPKAHAAAYVLMAVRIAYFKVHHPLYYYASYFTIRASDFDLITMIKDKTSIRNTVKDMYSRYMDLGKKEKDVLTVLEIMNEMAHRGYRMQPISLEKSQAFEFIIEGDTLIPPFISVPGLGENVAKRIVEARDDGPFLSKEDLNKKAGLSQKIIEYLDELGSLPNLPDKAQLSIFDM

SEQ ID NO: 12322 - protein, 713 aa, Staphylococcus aureus
MNIIRSDYMSKQRIYEYAKELNLKSKEIIDELKSMNIEVSNHMQALEDDQIKALDKKFKKEQKNDNKQSTQNNHQKSNNQNQNKGQQKDNKKNQQQNNKGNKGNKKNNRNNKKNNKNNKPQNQPAALKEIPSKVTYQEGITVGEFADKLNVESSEIIKKLFLLGIVANINQSLNQETIELIADDYGVEVEEEVVINEEDLSIYFEDEKDDPEAIERPAVVTIMGHVDHGKTTLLDSIRHTKVTAGEAGGITQHIGAYQIENDGKKITFLDTPGHAAFTTMRARGAQVTDITILVVAADDGVMPQTIEAINHAKEAEVPIIVAVNKIDKPTSNPDRVMQELTEYGLIPEDWGGETIFVPLSALSGDGIDDLLEMIGLVAEVQELKANPKNRAVGTVIEAELDKSRGPSASLLVQNGTLNVGDAIVVGNTYGRIRAMVNDLGQRIKTAGPSTPVEITGINDVPQAGDRFVVFSDEKQARRIGESRHEASIVQQRQESKNVSLDNLFEQMKQGEMKDLNVIIKGDVQGSVEALAASLMKIDVEGVNVRIIHTAVGAINESDVTLANASNGIIIGFNVRPDSGAKRAAEAENVDMRLHRVIYNVIEEIESAMKGLLDPEFEEQVIGQAEVRQTFKVSKVGTIAGCYVTEGKITRNAGVRIIRDGIVQYEGELDTLKRFKDDAKEVAKGYECGITIENYNDLKEGDVIEAFEMVEIKR

SEQ ID NO: 12323 - protein, 294 aa, Staphylococcus aureus
MVIQWYPGHMAKAKREVSEQLKKVDVVFELVDARIPYSSRNPMIDEVINQKPRVVILNKKDMSNLNEMSKWEQFFIDKGYYPVSVDAKHGKNLKKVEAAAIKATAEKFEREKAKGLKPRAIRAMIVGIPNVGKSTLINKLAKRSIAQTGNKPGVTKQQQWIKVGNALQLLDTPGILWPKFEDEEVGKKLSLTGAIKDSIVHLDEVAIYGLNFLIQNDLARLKAHYKIEVPEDAEIIAWFDAIGKKRGLIRRGNEIDYEAVIELIIYDIRNAKIGNYCFDIFKDMTEELANDANN

SEQ ID NO: 12324 - protein, 89 aa, Staphylococcus aureus; identical to SEQ ID NO: 5442

SEQ ID NO: 12325 - protein, 698 aa, Staphylococcus aureus
MSQEKKVFKTEWAGRSLTIETGQLAKQANGAVLVRYGDTVVLSTATASKEPRDGDFFPLTVNYEEKMYAAGKIPGGFKKREGRPGDDATLTARLIDRPIRPLFPKGYKHDVQIMNMVLSADPDCSPQMAAMIGSSMALSVSDIPFQGPIAGVNVGYIDGKYIINPTVEEKEVSRLDLEVAGHKDAVNMVEAGASEITEQEMLEAIFFGHEEIQRLVDFQQQIVDHIQPVKQEFIPAERDEALVERIKSLTEEKGLKETVLTFDKQQRDENLDNLKEEIVNEFIDEEDPENELLIKEVYAILNELVKEEVRRLIADEKIRPDGRKPDEIRPLDSEVGILPRTHGSGLFTRGQTQALSVLTLGALGDYQLIDGLGPEEEKRFMHHYNFPNFSVGETGPVRAPGRREIGHGALGERALKYIIPDTADFPYTIRIVSEVLESNGSSSQASICGSTLALMDAGVPIKAPVAGIAMGLVTREDSYTILTDIQGMEDALGDMDFKVAGTKEGITAIQMDIKIDGLTREIIEEALEQARRGRLEIMNHMLQTIDQPRTELSAYAPKVVTMTIKPDKIRDVIGPGGKKINEIIDETGVKLDIEQDGTIFIGAVDQAMINRAREIIEEITREAEVGQTYQATVKRIEKYGAFVGLFPGKDALLHISQISKNRIEKVEDVLKIGDTIEVKITEIDKQGRVNASHRALEE

SEQ ID NO: 12326 - protein, 574 aa, Staphylococcus aureus
MNSEFIYGRVTNLGGKILSLIKKKNKDIRIIPLGGVGEIAKNMYIVEVDDEMFMLDAGLMFPEDEMLGIDIVIPDISYVLENKDKLKGIFLTHGHEHAIGAVSYVLEQLDAPVYGSKLTIALIKENMKARNIDKKVRYYTVNNDSIMRFKNVNISFFNTTHSIPDSLGVCIHTSYGAIVYTGEFKFDQSLHGHYAPDIKRMAEIGEEGVFVLISDSTEAEKPGYNTPENVIEHHMYDAFAKVRGRLIVSCYASNFIRIQQVLNIASKLNRKVSFLGRSLESSFNIARKMGYFDIPKDLLIPITEVDNYPKNEVIIIATGMQGEPVEALSQMAQHKHKIMNIEEGDSVFLAITASANMEVIIANTLNELVRAGAHIIPNNKKIHASSHGCMEELKMMINIMKPEYFIPVQGEFKMQIAHAKLAAEAGVAPEKIFLVEKGDVINYNGKDMILNEKVNSGNILIDGIGIGDVGNIVLRDRHLLAEDGIFIAVVTLDPKNRRIAAGPEIQSRGFVYVRESEDLLREAEEKVREIVEAGLQEKRIEWSEIKQNMRDQISKLLFESTKRRPMIIPVISEI

SEQ ID NO: 12327 - protein, 792 aa, Staphylococcus aureus
MRQLAQAKKKSTAKKKTTSKKRTNSRKKKNDNPIRYVIAILVVVLMVLGVFQLGIIGRLIDSFFNYLFGYSRYLTYILVLLATGFITYSKRIPKTRRTAGSIVLQIALLFVSQLVFHFNSGIKAEREPVLSYVYQSYQHSHFPNFGGGVLGFYLLELSVPLISLFGVCIITILLLCSSVILLINHQHRDVAKVALENIKAWFGSFNEKMSERNQEKQLKREEKARLKEEQKARQNEQPQIKDVSDFTEVPQERDIPIYGHTENESKSQSQPSRKKRVFDAENSSNNIVNHHQADQQEQLTEQTHNSVESENTIEEAGEVTNVSYVVPPLTLLNQPAKQKATSKAEVQRKGQVLENTLKDFGVNAKVTQIKIGPAVTQYEIQPAQGVKVSKIVNLHNDIALALAAKDVRIEAPIPGRSAVGIEVPNEKISLVSLKEVLDEKFPSNNKLEVGLGRDISGDPITVPLNEMPHLLVAGSTGSGKSVCINGIITSILLNAKPHEVKLMLIDPKMVELNVYNGIPHLLIPVVTNPHKAAQALEKIVAEMERRYDLFQHSSTRNIKGYNELIRKQNQELDEKQPELPYIVVIVDELADLMMVAGKEVENAIQRITQMARAAGIHLIVATQRPSVDVITGIIKNNIPSRIAFAVSSQTDSRTIIGTGGAEKLLGKGDMLYVGNGDSSQTRIQGAFLSDQEVQDVVNYVVEQQQANYVKEMEPDAPVDKSEMKSEDALYDEAYLFVVEQQKASTSLLQRQFRIGYNRASRLMDDLERNQVIGPQKGSKPRQVLIDLNNDEV

SEQ ID NO: 12328 - protein, 234 aa, Staphylococcus aureus
MKALVLGGSGSIGSEIVKQLLTDGFEVYVQYYRTDINELTSKFNDDKVHFIQADLSQTIDIDKTFGDIKSLDCLIYASGQSLYGVLQDMKDHDIDACYQLNVLQLIRLCRYFVDVLRQSDNGRIIVISSIWGETGASMETIYSTMKSAQLGFVKALSQELALTSVTVNAITPGFVAGNMASEWQEDELQEMITELPQQRLVLPSEVAHTCAYLYHPNARSVTGTIQKVNGAWYI

SEQ ID NO: 12329 - protein, 293 aa, Staphylococcus aureus
MNITMNHNLLIKQGVRFTMTVAEKKEWYLEYEIEINRPGLLGDVSSLLGMLGISIVTINGVDQGKRGLLIKTDNLEKVERFEQIARGINEIEITKLKKPELRDRLAVRHGRYIEQDAKDKKTFRFEREDLGLLVDFLAELFKEEGHKLIGIRGMPRVGKTESIVAGSVCAHKRWLFISSTLIKQTVRSSLIKGEYDANHVYIIDGAVTARESNPKHQELVNEVMTLPSIKVVEHPDLFVETSTCTMEDFDYIIELRENENQEIHYEEMKKQTVQSKNNLDFGDPFGGGFGFFE

SEQ ID NO: 12330 - protein, 192 aa, Staphylococcus aureus [sequence omitted]

SEQ ID NO: 12331 - protein, 519 aa, Staphylococcus aureus
MNLLSLLLILLGIILGVVGGYVVARNLLLQKQSQARQTAEDIVNQAHKEADNIKKEKLLEAKEENQILREQTEAELRERRSELQRQETRLLQKEENLERKSDLLDKKDEILEQKESKIEEKQQQVDAKESSVQTLIMKHEQELERISGLTQEEAINEQLQRVEEELSQDIAVLVKEKEKEAKEKVDKTAKELLATAVQRLAADHTSESTVSVVNLPNDEMKGRIIGREGRNIRTLETLTGIDLIIDDTPEAVILSGFDPIRREIARTALVNLVSDGRIHPGRIEDMVEKARKEVDDIIREAGEQATFEVNAHNMHPDLVKIVGRLNYRTSYGQNVLKHSIEVAHLASMLAAELGEDETLAKRAGLLHDVGKAIDHEVEGSHVEIGVELAKKYGENETVINAIHSHHGDVEPTSIISILVAAADALSAARPGARKETLENYIRRLERLETLSESYDGVEKAFAIQAGREIRVIVSPEEIDDLKSYRLARDIKNQIEDELQYPGHIKVTVVRETRAVEYAK

SEQ ID NO: 12332 - protein, 265 aa, Staphylococcus aureus
MRIIFIGDIVGKIGRDAIETYIPQLKQKYKPTVTIVNAENAAHGKGLTEKIYKQLLRNGVDFMTMGNHTYGQREIYDFIDEAKRLVRPANFPDEAPGIGMRFIQINDIKLAVINLQGRAFMPDIDDPFKKADQLVKEAQEQTPFIFVDFHAETTSEKYAMGWHLDGRASAVVGTHTHIQTADERILPKGTGYITDVGMTGFYDGILGINKTEVIERFITSLPQRHVVPNEGRSVLSGVVIDLDKEGKTKHIERILINDDHPFSTF

SEQ ID NO: 12333 - protein, 872 aa, Staphylococcus aureus
MSNVTPMMQQYLKIKSEYQDCLLFFRLGDFYEMFYEDAKEASRVLEITLTKRDAKKENPIPMCGVPYHSADSYIDTLVNNGYKVAICEQMEDPKQTKGMVRREVVRIVTPGTVMEQGGVDDKQNNYILSFVMNQPEIALSYCDVSTGELKVTHFNDEATLLNEITTINPNEVVINDNISDHLKRQINMVTETITVRETLSSEIYSVNQTEHKLMYQATQLLLDYIHHTQKRDLSHIEDVVQYAAIDYMKMDFYAKRNLELTESIRLKSKKGTLLWLMDETKTPMGARRLKQWIDRPLISKEQIEARLDIVDEFSAHFIERDTLRTYLNQVYDIERLVGRVSYGNVNARDLIQLKHSISEIPNIKALLNSMNQDTLVQVNQLEPLDDLLDILEQSLVEEPPISVKDGGLFKVGFNMQLDEYLEASKNGKTWLAELQAKERQRTGIKSLKISFNKVFGYFIEITRANLQNFEPSEFGYMRKQTLSNAERFITDELKEKEDIILGAEDKAIELEYQLFVQLREKVKKYTERLQQQAKIISELDCLQSFAEIAQKYNYTRPSFSENKTLELVESRHPVVERVMDYNDYVPNNCRLDNETFIYLITGPNMSGKSTYMRQVAIISIMAQMGAYVPCKEAVLPIFDQIFTRIGAADDLVSGKSTFMVEMLEAQKALTYATEDSLIIFDEIGRGTSTYDGLALAQAMIEYVAETSHAKTLFSTHYHELTTLDQALPSLKNVHVAANEYNGELIFLHKVKDGAVDDSYGIQVAKLADLPEKVISRAQVILSEFEASADKKSSISNLKMVENEPEINQENSNLSVEETTDTLSQKDFEQASFDLFENDQESEIELQIKNLNLSNMTPIEALVKLSELQNQLK

SEQ ID NO: 12334 - protein, 669 aa, Staphylococcus aureus; identical to SEQ ID NO: 5262

SEQ ID NO: 12335 - protein, 498 aa, Staphylococcus aureus
MEKYILSIDQGTTSSRAILFNQKGEIAGVAQREFKQYFPQSGWVEHDANEIWTSVLAVMTEVINENDVRADQIAGIGITNQRETTVVWDKHTGRPIYHAIVWQSRQTQSICSELKQQGYEQTFRDKTGLLLDPYFAGTKVKWILDNVEGAREKAENGDLLFGTIDTWLVWKLSGKAAHITDYSNASRTLMFNIHDLEWDDELLELLTVPKNMLPEVKPSSEVYGKTIDYHFYGQEVPIAGVAGDQQAALFGQACFERGDVKNTYGTGGFMLMNTGDKAVKSESGLLTTIAYGIDGKVNYALEGSIFVSGSAIQWLRDGLRMINSAPQSESYATRVDSTEGVYVVPAFVGLGTPYWDSEARGAIFGLTRGTEKEHFIRATLESLCYQTRDVMEAMSKDSGIDVQSLRVDGGAVKNNFIMQFQADIVNTSVERPEIQETTALGAAYLAGLAVGFWESKDDIAKNWKLEEKFDPKMDEGEREKLYRGWKKAVEATQVFKTE

SEQ ID NO: 12336 - protein, 302 aa, Staphylococcus aureus
MSVFIDKNTKVMVQGITGSTALFHTKQMLDYGTKIVAGVTPGKGGQVVEGVPVFNTVEEAKNETGATVSVIYVPAPFAADSILEAADADLDMVICITEHIPVLDMVKVKRYLQGRKTRLVGPNCPGVITADECKIGIMPGYIHKKGHVGVVSRSGTLTYEAVHQLTEEGIGQTTAVGIGGDPVNGTNFIDVLKAFNEDDETKAVVMIGEIGGTAEEEAAEWIKANMTKPVVGFIGGQTAPPGKRMGHAGAIISGGKGTAEEKIKTLNSCGVKTAATPSEIGSTLIEAAKEAGIYESLLTVNK

SEQ ID NO: 12337 - protein, 305 aa, Staphylococcus aureus
MMTEKQFKLTVQDNTNIEVKVNFTDVDSKGIIHIFHGMAEHMERYDKLAHALSKDGFDVIRHNHRGHGINIDESTRGHYDDMKRVIGDAFEVAQTVRGNVDKPYIIIGHSMGSVIARLFVETYPQYVDGLILSGTGMYPLWKGLPTVKVLQLITKIYGAEKRVEWVNQLVSNSFNKKIRPLRTQSDWISSNPTEVDNFIKDPYSGFNVSNQLLYQTAYYMLHTSQLKNIKKLNHAMPILLVSGYDDPLGDYGKGILKLANIYRKAGIKNVKVNLYHHKRHEVLFEKDHDKIWEDLFKWLNQFYKK

SEQ ID NO: 12338 - protein, 446 aa, Staphylococcus aureus; identical to SEQ ID NO: 5733

SEQ ID NO: 12339 - protein, 691 aa, Staphylococcus aureus
MTLADNLVIVESPAKAKTIEKYLGKKYKVIASMGHVRDLPRSQMGVDTEDNYEPKYITIRGKGPVVKELKKHAKKAKNVFLASDPDREGEAIAWHLSKILELEDSKENRVVFNEITKDAVKESFKNPREIEMNLVDAQQARRILDRLVGYNISPVLWKKVKKGLSAGRVQSVALRLVIDRENEIRNFKPEEYWTIEGEFRYKKSKFNAKFLHYKNKPFKLKTKKDVEKITAALNGDQFEITNVTKKEKTRNPANPFTTSTLQQEAARKLNFKARKTMMVAQQLYEGIDLKKQGTIGLITYMRTDSTRISDTAKAEAKQYITDKYGESYTSKRKASGKQGDQDAHEAIRPSSTMRTPDDMKSFLTKDQYRLYKLIWERFVASQMAPAILDTVSLDITQGDIKFRANGQTIKFKGFMTLYVETKDDSDSEKENKLPKLEQGDKVTATQIEPAQHYTQPPPRYTEARLVKTLEELKIGRPSTYAPTIDTIQKRNYVKLESKRFVPTELGEIVHEQVKEYFLEIIDVEFTVNMETLLDKIAEGDITWRKVIDGFFSSFKQDVERAEEEMEKIEIKDEPAGEDCEVCGSPMVIKMGRYGKFMACSNFPDCRNTKAIVKSIGVKCPKCNDGDVVERKSKKNRVFYGCSKYPECDFISWDKPIGRDCPKCNQYLVENKKGKTTQVICSNCDYKEAAQK

SEQ ID NO: 12340 - protein, 266 aa, Staphylococcus aureus; identical to SEQ ID NO: 5346

SEQ ID NO: 12341 - protein, 195 aa, Staphylococcus aureus
MKEIVIASNNQGKINDFKVIFPDYHVIGISELIPDFDVEETGSTFEENAILKSEAAAKALNKTVIADDSGLEVFALNGEPGIYSARYAGENKSDEANIEKLLNKLGNTTDRRAQFVCVISMSGPDMETKVFKGTVSGEIADGKYGENGFGYDPIFYVPKLDKTMAQLSKEQKGQISHRRNAINLLQAFLEGDKNV

SEQ ID NO: 12342 - protein, 313 aa, Staphylococcus aureus
MNMMAKIVVALGGNALGKSPQEQLELVKNTAKSLVGLITKGHEIVISHGNGPQVGSINLGLNYAAEHNQGPAFPFAECGAMSQAYIGYQLQESLQNELHSIGMDKQVVTLVTQVEVDENDPAFNNPSKPIGLFYNKEEAEQIQKEKGFIFVEDAGRGYRRVVPSPQPISIIELESIKTLIKNDTLVIAAGGGGIPVIREQHDGFKGIDAVIDKDKTSALLGANIQCDQLIILTAIDYVYINFNTENQQPLKTTNVDELKRYIDENQFAKGSMLPKIEAAISFIENNPKGSVLITSLNELDAALEGKVGTVIKK

SEQ ID NO: 12343 - protein, 662 aa, Staphylococcus aureus
MNFPWDQLLVKGNWMITMAQIGAPFLVIGLIAVITYFKLWKYLYKEWFTSVDHKKIGVMYLICAVLMFVRGGIDALLIRAQLTVPDNKFLESNHYNEIFSTHGVIMIIFMAMPFIFGLWNIVVPLQIGARDVAFPVLNNVSFWLFFAGMILFNLSFIIGGSPAAGWTNYAPLAGEFSPGPGVNYYLIAIQISGLGTLATGINFFVTILRCKTPTMKFMQMPMFTVTTFITTLIVILAFPPLTVALALMTTDRIFDTAFFTVAHGGMPMLWANFFWVWGHPEVYIVILPAFGIYSEIIPTFARKRLFGHQSMVWATAGIAFLSFLVWVHHFFTMGNGALINSFFSISTMLIGIPTGVKLFNWLLTLYKGRITFESPMLFSLAFIPNFLLGGVTGVMLAMASADYQYHNTYFLVAHFHYTLVTGVVFACLAGLIFWYPKMMGYKLNETLNKWCFWFFMIGFNVCFLPQFILGLDGMPRRLYTYMPSDGWFLLNLISTIGALLMAIGFLFLVVSIVYSHFKSPREATGDNWDGLGRTLEWTTASAIPPKYNFAITPDWNDYDTFVDMKEHGRHYLDNHNYKDIHMPNNTPVGFWIGIFMTIGGFFLIFETVIPALICLFGIFGTMIYRSFQIDHGYHIPAAEVAETEARLREARIKEREAVSHES

SEQ ID NO: 12344 - protein, 311 aa, Staphylococcus aureus
MFHHISVMLNETIDYLNVKENGVYIDCTLGGAGHALYLLNQLNDDGRLIAIDQDQTAIDNAKEVLKDHLHKVTFVHSNFRELTQILKDLNIEKVDGIYYDLGVSSPQLDIPERGFSYHHDATLDMRMDQTQELTAYEIVNNWSYEALVKIFYRYGEEKFSKQIARRIEAHREQQPITTTLELVDIIKEGIPAKARRKGGHPAKRVFQALRIAVNDELSAFEDSIEQAIELVKVDGRISVITFHSLEDRLCKQVFQEYEKGPEVPRGLPVIPEAYTPKLKRVNRKPITATEEDLDDNNRARSAKLRVAEILK

SEQ ID NO: 12345 - protein, 366 aa, Staphylococcus aureus
MSKFKSLLLLFGTLILLSGCSNIEIFNAKGPVASSQKFLILYSIVFMLVICFVVLGMFAIFIYKYSYNKNAESGKMHHNAIIETIWFVIPIIIVAALAIPTVKTLYDYEKPPKSEKDPMVVYAVSAGYKWFFAYPDEHIETVNTLTIPKDRPVVFKLQAMDTMTSFWIPQLGGQKYAMTGMTMNWTLEASQTGTFRGRNSNFNGEGFSRQTFKVNAVSQKDYDKWVKEVKGKKTLDQDTFDKQLLPSTPNKALEFNGTHMAFVDPAADPEYIFYAYKRFNFELKDPNFTSEENMFKDVSDKPLIPARKAQITNANYKRHGMKLMILGNDEPYNNEFKKDESKNAKEMKKISKDAQDQDNDDHGGGH

SEQ ID NO: 12346 - protein, 744 aa, Staphylococcus aureus; identical to SEQ ID NO: 5473

SEQ ID NO: 12347 - protein, 321 aa, Staphylococcus aureus
MIFVYALLALVITFVLVPVLIPTLKRMKFGQSIREEGPQSHMKKTGTPTMGGLTFLLSIVITSLVAIIFVDQANPIILLLFVTIGFGLIGFIDDYIIVVKKNNQGLTSKQKFLAQIGIAIIFFVLSNVFHLVNFSTSIHIPFTNVAIPLSFAYVIFIVFWQVGFSNAVNLTDGLDGLATGLSIIGFTMYAIMSFVLGETAIGIFCIIMLFALLGFLPYNINPAKVFMGDTGSLALGGIFATISIMLNQELSLIFIGLVFVIETLSVMLQVASFKLTGKRIFKMSPIHHHFELIGWSEWKVVTVFWAVGLISGLIGLWIGVH

SEQ ID NO: 12348 - protein, 449 aa, Staphylococcus aureus; identical to SEQ ID NO: 5474

SEQ ID NO: 12349 - protein, 439 aa, Staphylococcus aureus; identical to SEQ ID NO: 5475

SEQ ID NO: 12350 - protein, 88 aa, Staphylococcus aureus; identical to SEQ ID NO: 5525

SEQ ID NO: 12351 - protein, 572 aa, Staphylococcus aureus; identical to SEQ ID NO: 5526

SEQ ID NO: 12352 - protein, 565 aa, Staphylococcus aureus
MKQLHPNEVGVYALGGLGEIGKNTYAVEYKDEIVIIDAGIKFPDDNLLGIDYVIPDYTYLVQNQDKIVGLFITHGHEDHIGGVPFLLKQLNIPIYGGPLALGLIRNKLEEHHLLRTAKLNEINEDSVIKSKHFTISFYLTTHSIPETYGVIVDTPEGKVVHTGDFKFDFTPVGKPANIAKMAQLGEEGVLCLLSDSTNSLVPDFTLSEREVGQNVDKIFRNCKGRIIFATFASNIYRVQQAVEAAIKNNRKIVTFGRSMENNIKIGMELGYIKAPPETFIEPNKINTVPKHELLILCTGSQGEPMAALSRIANGTHKQIKIIPEDTVVFSSSPIPGNTKSINRTINSLYKAGADVIHSKISNIHTSGHGSQGDQQLMLRLIKPKYFLPIHGEYRMLKAHGETGVECGVEEDNVFIFDIGDVLALTHDSARKAGRIPSGNVLVDGSGIGDIGNVVIRDRKLLSEEGLVIVVVSIDFNTNKLLSGPDIISRGFVYMRESGQLIYDAQRKIKTDVISKLNQNKDIQWHQIKSSIIETLQPYLFEKTARKPMILPVIMKVNEQKESNNK

SEQ ID NO: 12353 - protein, 370 aa, Staphylococcus aureus; identical to SEQ ID NO: 5528

SEQ ID NO: 12354 - protein, 325 aa, Staphylococcus aureus; identical to SEQ ID NO: 5529

SEQ ID NO: 12355 - protein, 468 aa, Staphylococcus aureus; identical to SEQ ID NO: 5530

SEQ ID NO: 12356 - protein, 290 aa, Staphylococcus aureus
MKYGFRKIEAIVGTLIFTVLFIFIFEVYISSPQLNAVLNGFIPHSEIITNNGILYIALGIIGATIMPHNLYLHSSIVQSRTYSRHNNEEKAQAIKFATIDSNIQLSIAFVVNCLLLVLGASLFFNSNADDLGGFYDLYHALKTEPVLGATMGAIMSTLFAVALLASGQNSTITGTLAGQIVMDCFLRLHIPNWLRRLITRSLAVIPVIVCLIIFRGNAAKIEQLLVFSQVFLSIALPFCLIPLQLATSNKDLMGPFYNKTWVNIISWTLIIILSILNVYLIVQTFQELQG

SEQ ID NO: 12357 - protein, 126 aa, Staphylococcus aureus
MNNKRHSTNEQLSLDEINNTIKFDHRSSNKQKFLSFLGPGLLVAVGYMDPGNWITSMQGGAQYGYTLLFVILISSLSAMLLQSMTVRLGIATGMDLAQMTRHYLSRTYCYNLLDYCRTSNYRHRYC

SEQ ID NO: 12358 - protein, 601 aa, Staphylococcus aureus
MGFYLRKKETIYMTNKREDVRNIAIIAHVDHGKTTLVDELLKQSGIFRENEHVDERAMDSNDIERERGITILAKNTAVDYKGTRINILDTPGHADFGGEVERIMKMVDGVVLVVDAYEGTMPQTRFVLKKALEQNLKPVVVVNKIDKPSARPEGVVDEVLDLFIELEANDEQLEFPVVYASAVNGTASLDPDKQDDNLQSLYETIIDYVPAPIDNSDEPLQFQVALLDYNDYVGRIGIGRVFRGKMRVGDNVSLIKLDGTVKNFRVTKIFGYFGLKRLEIEEAQAGDLIAVSGMEDINVGETVTPHDHQEALPVLRIDEPTLEMTFKVNNSPFAGREGDFVTARQIQERLNQQLETDVSLKVSNTDSPDTWVVAGRGELHLSILIENMRREGYELQVSKPQVIIKEIDGVMCEPFERVQCEVPQENAGAVIESLGARKGEMVDMTTTDNGLTRLIFNVPARGMIGYTTEFMSMTRGYGIINHTFEEFRPRIKAQIGGRRNGALISMDQGSASTYAILGLEDRGVNFMEPGTEVYEGMIVGEHNRENDLTVNITKTKHQTNVRSATKDQTQTMNRPRILTLEEALQFINDDELVEVHQKAYV

SEQ ID NO: 12359 - protein, 91 aa, Staphylococcus aureus
MAKQTTMKNAALKQLTKDADEILHLIKVQLDNLTLPSCPLYEEVLDTQMFGLQKEVDFAVKLGLVDREDGKQIMLRLEKELSKLHEAFTLV

SEQ ID NO: 12360 - protein, 412 aa, Staphylococcus aureus
MTEYMKNFRSILRYIGKTSKFIDYPLLVTYIVLSLIGLVMVYSASMVPATKGTLTGGIDVPGTYFYNRQLAYVIMSFIIVFFIAFLMNVKLLSNIKVQKGMIITIVSLLLLTLVIGKDINGSKSWINLGFMNLQASELLKIAIILYIPFMISKKMPRVLSKPKLILSPIVLALGCTFLVFLQKDVGQTLLILIILVAIIFYSGIGVNKVLRFGIPAVLGFLVVFVIALMAGWLPSYLTARFSTLTDPFQFESGTGYHISNSLLAIGNGGVFGKGLGNSAMKLGYLPEPHTDFIFAIICEELGLIGGLLVITLEFFIVYRAFQFANKTSSYFYKLVCVGIATYFGSQTFVNIGGISATIPLTGVPLPFISFGGSSMISLSIAMGLLLIVGKQIKVDQQRKKQQQKVDIRRQFN

SEQ ID NO: 12361 - protein, 1073 aa, Staphylococcus aureus
MDAIHPGYGFLSENEQFARRCAEEGIKFIGPHLEHLDMFGDKVKARTTAIKADLPVIPGTDGPIKSYELAKEFAEEAGFPLMIKATSGGGGKGMRIVREESELEDAFHRAKSEAEKSFGNSEVYIERYIDNPKHIEVQVIGDEHGNIVHLFERDCSVQRRHQKVVEVAPSVGLSPTLRQRICDAAIQLMENIKYVNAGTVEFLVSGDEFFFIEVNPRVQVEHTITEMVTGIDIVKTQILVAAGADLFGEEINMPQQKDITTLGYAIQCRITTEDPLNDFMPDTGTIIAYRSSGGFGVRLDAGDGFQGAEISPYYDSLLVKLSTHAISFKQAEEKMVRSLREMRIRGVKTNIPFLINVMKNKKFTSGDYTTKFIEETPELFDIQPSLDRGTKTLEYIGNVTINGFPNVEKRPKPDYELASIPTVSSSKIASFSGTKQLLDEVGPKGVAEWVKKQDDVLLTDTTFRDAHQSLLATRVRTKDMINIASKTADVFKDGFSLEMWGGATFDVAYNFLKENPWERLERLRKAIPNVLFQMLLRASNAVGYKNYPDNVIHKFVQESAKAGIDVFRIFDSLNWVDQMKVANEAVQEAGKISEGTICYTGDILNPERSNIYTLEYYVKLAKELEREGFHILAIKDMAGLLKPKAAYELIGELKAAVDLPIHLHTHDTSGNGLLTYKQAIDAGVDIIDTAVASMSGLTSQPSANSLYYALNGFPRHLRTDIEGMESLSHYWSTVRTYYSDFESDIKSPNTEIYQHEMPGGQYSNLSQQAKSLGLGERFDEVKDMYRRVNFLFGDIVKVTPSSKVVGDMALYMVQNDLDEQSVITDGYKLDFPESVVSFFKGEIGQPVNGFNKDLQAVILKGQEALTARPGEYLEPVDFEKVRELLEEEQQGPVTEQDIISYVLYPKVYEQYIQTRNQYGNLSLLDTPTFFFGMRNGETVEIEIDKGKRLIIKLETISEPDENGNRTIYYAMNGQARRIYIKDENVHTNANVKPKADKSNPSHIGAQMPGSVTEVKVSVGETVKANQPLLITEAMKMETTIQAPFDGVIKQVTVNNGDTIATGDLLIEIEKATD

SEQ ID NO: 12362 - protein, 147 aa, Staphylococcus aureus; identical to SEQ ID NO: 5241

SEQ ID NO: 12363 - protein, 358 aa, Staphylococcus aureus; identical to SEQ ID NO: 5248

SEQ ID NO: 12364 - protein, 244 aa, Staphylococcus aureus
MRMKRFLTIVQILLVVIIIIFGYKIVQTYIEDKQERANYEKLQQKFQMLMSKHQAHVRPQFESLEKINKDIVGWIKLSGTSLNYPVLQGKTNHDYLNLDFEREHRRKGSIFMDFRNELKNLNHNTILYGHHVGDNTMFDVLEDYLKQSFYEKHKIIEFDNKYGKYQLQVFSAYKTTTKDNYIRTDFENDQDYQQFLDETKRKSVINSDVNVTVKDKIMTLSTCEDAYSETTKRIVVVAKIIKVS

SEQ ID NO: 12365 - protein, 352 aa, Staphylococcus aureus
MSEQQTMSELKQQALVDINEANDERALQEVKVKYLGKKGSVSGLMKLMKDLPNEEKPAFGQKVNELRQTIQNELDERQQMLVKEKLNKQLAEETIDVSLPGRHIEIGSKHPLTRTIEEIEDLFLGLGYEIVNGYEVEQDHYNFEMLNLPKSHPARDMQDSFYITDEILLRTHTSPVQARTMESRHGQGPVKIICPGKVYRRDSDDATHSHQFTQIEGLVVDKNVKMSDLKGTLELLAKKLFGADREIRLRPSYFPFTEPSVEVDVSCFKCKGKGCNVCKHTGWIEILGAGMVHPNVLEMAGFDSSEYSGFAFGMGPDRIAMLKYGIEDIRHFYTNDVRFLDQFKAVEDRGDM

SEQ ID NO: 12366 - protein, 800 aa, Staphylococcus aureus
MLISNEWLKEYVTIDDSVSNLAERITRTGIEVDDLIDYTKDIKNLVVGFVKSKEKHPDADKLNVCQVDIGEDEPVQIVCGAPNVDAGQYVIVAKVGGRLPGGIKIKRAKLRGERSEGMICSLQEIGISSNYIPKSFESGIYVFSESQVPGTDALQALYLNDQVMEFDLTPNRADALSMIGTAYEVAALYNTKMTKPETTSNELELSANDELTVTIENEDKVPYYSARVVHDVTIEPSPIWMQARLIKAGIRPINNVVDISNYVLLEYGQPLHMFDQDAIGSQQIVVRQANEGEKMTTLDDTERELLTSDIVITNGQTPIALAGVMGGDFSEVKEHTSNIVIEGAIFDSVSIRHTSRRLNLRSESSSRFEKGIATEFVDEAVDRACYLLQTYANGKVLKDRVSSGELGAFITPIDITADKINRTIGFDLSQNDIVTIFNQLGFDTEINDDVITVQVPSRRKDITIKEDLIEEVARIYGYDDIPSTLPVFEKVTSGQLTDRQYKTRMVKEVLEGAGLDQAITYSLVSKEDTTAFAMQQRQTIDLLMPMSEAHASLRQSLLPHLIEAASYNVARKNKDVKLFEIGNVFFANGEGELPDQVEYLSGILTGDYVVNQWQGKKETVDFYLAKGVVDRVSEKLNLEFSYRRADIDGLHPGRTAEILLENKVVGFIGELHPTLAAENDLKRTYVFELNFDALMAVSVGYINYQPIPRFPGMSRDIALEVDQNIPAADLLSTIHAHGGNILKDTLVFDVYQGEHLEKGKKSIAIRLNYLDTEETLTDERVSKVQAEIEAALIEQGAVIR

SEQ ID NO: 12367 - protein, 782 aa, Staphylococcus aureus
MRQKTLDVLEFEKIKSLVANETISDLGLEKVNQMMPATNFETVVFQMEETDEIAQIYNKHRLPSLSGLSKVSAFIHRADIGGVLNVSELNLIKRLIQVQNQFKTFYNQLVEEDEGVKYPILDDKMNQLPVLTDLFQQINETCDTYDLYDNASYELQGIRSKISSTNQRIRQNLDRIVKSQANQKKLSDAIVTVRNERNVIPVKAEYRQDFNGIVHDQSASGQTLYIEPSSVVEMNNQISRLRHDEAIEKERILTQLTGYVAADKDALLVAEQVMGQLDFLIAKARYSRSIKGTKPIFKEERTVYLPKAYHPLLNRETVVANTIEFMEDIETVIITGPNTGGKTVTLKTLGLIIVMAQSGLLIPTLDGSQLSVFKNVYCDVGDEQSIEQSLSTFSSHMTNIVEILKHADKHSLVLFDELGAGTDPSEGAALAMSILDHVRKIGSLVMATTHYPELKAYSYNREGVMNASVEFDVDTLSPTYKLLMGVPGRSNAFDISKKLGLSLNIINKAKTMIGTDEKEINEMIESLERNYKRVETQRLELDRLVKEAEQVHDDLSKQYQQFQNYEKSLIEEAKEKANQKIKAATKEADDIIKDLRQLREQKGADVKEHELIDKKKRLDDHYEAKSIKQNVQKQKYDKIVAGDEVKVLSYGQKGEVLEIVNDEEAIVQMGIIKMKLPIEDLEKKQKEKVKPTKMVTRQNRQTIKTELDLRGYRYEDALIELDQYLDQAVLSNYEQVYIIHGKGTGALQKGVQQHLKKHKSVSDFRGGMPSEGGFGVTVATLK

SEQ ID NO: 12368 - protein, 607 aa, Staphylococcus aureus
MEENVVMCGIVGYIGYDNAKELLLKGLEKLEYRGYDSAGIAVVNDDNTTVFKEKGRIAELRKVADSSDFDGPVGIGHTRWATHGVPNHENSHPHQSSNGRFTLVHNGVIENYEELKGEYLQGVSFISETDTEVIVQLVEYFSNQGLSTEEAFTKVVSLLHGSYALGLLDAEDKDTIYVAKNKSPLLLGVGEGFNVIASDALAMLQVTSEYKEIHDHEIVIVKKDEVIIKDADGNVVERDSYIAEIDASDAEKGVYAHYMLKEIHEQPAVMRRIIQEYQDAEGNLKIDQDIINDVKEADRIYVIAAGTSYHAGLVGKEFLEKWAGVPTEVHVASEFVYNMPLLSEKPLFVYISQSGETADSRAVLVETNKLGHKSLTITNVAGSTLSREADHTLLLHAGPEIAVASTKAYTAQIAVLSILSQIVAKEHGREADIDLLRELAKVTTAIEAIVDDAPIMEQIATDFLETTRNAFFIGRTIDYNVSLEGALKLKEISYIQAEGFAGGELKHGTIALIEEGTPVVGLATQEKVNLSIRGNVKEVVARGAHPCIISMEGLEKEGDTYVIPHVHELLTPLVSVVTLQLISYYAALHRDLDVDKPRNLAKSVTVE

SEQ ID NO: 12369 - protein, 147 aa, Staphylococcus aureus
MSNQQDVVKELNQQVANWTVAYTKLHNFHWYVKGPNFFSLHVKFEELYNEASQYVDELAERILAVGGNPVGTLTECVEQSIVKEAAKGYSAEQMVEELSQDFTNISKQLEKAIEIAGNAGDDVSEDMFIGMQTSVDKHNWMFKSYLS

SEQ ID NO: 12370 - protein, 446 aa, Staphylococcus aureus
MLCPKLFKKRMIKMRMIDIIEKKRDGHTLTTEEINFFIDGYVKGDIPDYQASSLAMAIYFQDMNDDERAALTMAMVNSGDMIDLSDIKGVKVDKHSTGGVGDTTTLVLAPLVAAVDVPVAKMSGRGLGHTGGTIDKLEAIDGFHVEIDEATFVKLVNENKVAVVGQSGNLTPADKKLYALRDVTGTVNSIPLIASSIMSKKIAAGADAIVLDVKTGSGAFMKTLEDAEALAHAMVRIGNNVGRNTMAIISDMNQPLGRAIGNALELQEAIDTLKGHGPKDLTELVLTLGSQMVVLANKAETLEEARALLIEAIDSGAALEKFKTFIKNQGGDETVIDHPERLPQAQYQIEYKAKKSGYVTELVSNDIGVASMMLGAGRLTKEDDIDLAVGIVLNKKIGDKVEEGESLLTIHSNRQDVDDVVKKLDSSITIADHVVSPTLIHKIITE

SEQ ID NO: 12371 - protein, 394 aa, Staphylococcus aureus
MSEKQQILDYIETNKYSYIEISHRIHERPELGNEEIFASRTLIDRLKEHDFEIETEIAGHATGFIATYDSGLDGPAIGFLAEYDALPGLGHACGHNIIGTASVLGAIGLKQVIDQIGGKVVVLGCPAEEGGENGSAKASYVKAGVIDQIDIALMIHPGNETYKTIDTLAVDVLDVKFYGKSAHASENADEALNALDAMISYFNGVAQLRQHIKKGQRVHGVILDGGKAANIIPDYTHARFYTRAMTRKELDILTEKVNQIARGAAIQTGCDYEFGPIQNGVNEFIKTPKLDDLFAKYAEEVGEAVIDDDFGYGSTDTGNVSHVVPTIHPHIKIGSRNLVGHTHRFREAAASVHGDEALIKGAKIMALMGLELITNQDVYQDIIEEHAHLKGNGK

SEQ ID NO: 12372 - protein, 536 aa, Staphylococcus aureus
MTKFIFVTGGVVSSLGKGITASSLGRLLKDRGLNVTIQKFDPYLNVDPGTMSPYQHGEVFVTDDGAETDLDLGHYERFIDINLNKFSNVTAGKVYSHVLKKERRGDYLGGTVQVIPHITNEIKERLLLAGESTNADVVITEIGGTTGDIESLPFIEAIRQIRSDLGRENVMYVHCTLLPYIKAAGEMKTKPTQHSVKELRGLGIQPDLIVVRTEYEMTQDLKDKIALFCDINKESVIECRDADSLYEIPLQLSQQNMDDIVIKRLQLNAKYETQLDEWKQLLDIVNNLDGKITIGLVGKYVSLQDAYLSVVESLKHAGYPFAKDIDIRWIDSSEVTDENAAEYLADVDGILVPGGFGFRASEGKISAIKYARENNVPFFGICLGMQLATVEFSRNVLGLEGAHSAELDPATPYPIIDLLPEQKDIEDLGGTLRLGLYPCSIKEGTLAQDVYGKAEIEERHRHRYEFNNDYREQLEANGMVISGTSPDGRLVEMVEIPTNDFFIACQFHPEFLSRPNRPHPIFKSFIEASLKYQQNK

SEQ ID NO: 12373 - protein, 286 aa, Staphylococcus aureus
MPLVSMKEMLIDAKENGYAVGQYNINNLEFTQAILEASQEENAPVILGVSEGAARYMSGFYTIVKMVEGLMHDLNITIPVAIHLDHGSSFEKCKEAIDAGFTSVMIDASHSPFEENVATTKKVVEYAHEKGVSVEAELGTVGGQEDDVVADGIIYADPKECQELVEKTGIDALAPALGSVHGPYKGEPKLGFKEMEEIGLSTGLPLVLHGGTGIPTKDIQKAIPFGTAKINVNTENQIASAKAVRDVLNNDKEVYDPRKYLGPAREAIKETVKGKIKEFGTSNRAK

SEQ ID NO: 12374 - protein, 419 aa, Staphylococcus aureus
MAQEVIKIRGGRTLNGEVNISGAKNSAVAIIPATLLAQGHVKLEGLPQISDVKTLVSLLEDLNIKATLNGTELEVDTTEIQNAALPNNKVESLRASYYMMGAMLGRFKKCVIGLPGGCPLGPRPIDQHIKGFKALGAEIDESSTTSMKIEAKELKGAHIFLDMVSVGATINIMLAAVYATGQTVIENAAKEPEVVDVANFLTSMGANIKGAGTSTIKINGVKELHGSEYQVIPDRIEAGTYMCIAAACGENVILNNIVPKHVETLTAKFSELGVNVDVRDERIRINNNAPYQFVDIKTLVYPGFATDLQQPITPLLFMANGPSFVTDTIYPERFKHVEELKRMGANIEVDEGTATIKPSTLHGAEVYASDLRAGACLIIAGLIAEGVTTIYNVKHIYRGYTDIVEHLKALGADIWTETV

SEQ ID NO: 12375 - protein, 475 aa, Staphylococcus aureus
MRDYTKQYINGEWVESNSNETIEVINPATEEVIGKVAKGNKADVDKAVEAADNVYLEFRHTSVKERQALLDKIVKEYENRKDDIVQAITDELGAPLSLSERVHYQMGLNHFVAARDALDNYEFEERRGDDLVVKEAIGVSGLITPWNFPTNQTSLKLAAAFAAGSPVVLKPSEETPFAAVILAEIFDKVGVPKGVFNLVNGDGAGVGNPLSEHPKVRMMSFTGSGPTGSKIMEKAAKDFKKVSLELGGKSPYIVLDDVDIKEAAKATTGKVVNNTGQVCTAGTRVLVPNKIKDAFLAELKEQFSQVRVGNPREDGTQVGPIISKKQFDQVQNYINKGIEEGAELFYGGPGKPEGLEKGYFARPTIFINVDNQMTIAQEEIFGPVMSVITYNDLDEAIQIANDTKYGLAGYVIGKDKETLHKVARSIEAGTVEINEAGRKPDLPFGGYKQSGLGREWGDYGIEEFLEVKSIAGYFK

SEQ ID NO: 12376 - protein, 444 aa, Staphylococcus aureus
MGVNYMPERERTSPQYESFHELYKNYTTKELTQKAKTLKLTNYSKLNKKELVLAIMEAQMEKDGNYYMEGILDDIQPDGYGFLRTVNYSKGEKDIYISASQIRRFEIKRGDKVTGKVRKPKDNEKYYGLLQVDFVNDHNAEEVKKRPHFQALTPLYPDERIKLETETQNYSTRIMDLVTPIGLGQRGLIVAPPKAGKTSLLKEIANAISTNKPDAKLFILLVGERPEEVTDLERSVEAAEVVHSTFDEPPEHHVKVAELLLERAKRLVEIGEDVIILMDSITRLARAYNLVIPPSGRTLSGGLDPASLHKPKAFFGAARNIEAGGSLTILATALVDTGSRMDDMIYEEFKGTGNMELHLDRKLSERRIFPAIDIGRSSTRKEELLISKSELDTLWQLRNLFTDSTDFTERFIRKLKKSKNNEDFFKQLQKSAEESTKTGRPIIQ

SEQ ID NO: 12377 - protein, 84 aa, Staphylococcus aureus
MKQGIHPEYHQVIFLDTTTNFKFLSGSTKTSSEMMEWEDGKEYPVIRLDISSDSHPFYTGRQKFAAADGRVERFNKKFGLKSNN

SEQ ID NO: 12378 - protein, 310 aa, Staphylococcus aureus; identical to SEQ ID NO: 5632

SEQ ID NO: 12379 - protein, 203 aa, Staphylococcus aureus
MELSMYDTYHSGWIECITGSMFSGKSEELIRRLRRGIYAKQKVVVFKPAIDDRYHKEKVVSHNGNAIEAINISKASEIMTHDLTNVDVIGIDEVQFFDDEIVSIVEKLSADGHRVIVAGLDMDFRGEPFEPMPKLMAVSEQVTKLQAVCAVCGSSSSRTQRLINGKPAKIDDPIILVGANESYEPRCRAHHIVAPSDNNKEEL

SEQ ID NO: 12380 - protein, 358 aa, Staphylococcus aureus
MFDQLDIVEERYEQLNELLSDPDVVNDSDKLRKYSKEQADLQKTVDVYRNYKAKKEELADIEEMLSETDDKEEVEMLKEESSGIKAELPNLEEELKILLIPKDPNDDKDVIVEIRAAAGGDEAAIFAGDLMRMYSKYAESQGFKTEIVEASESDHGGYKEISFSVSGNGAYSKLKFENGAHRVQRVPETESGGRIHTSTATVAVLPEVEDVEIEIRNEDLKIDTYRSSGAGGQHVNTTDSAVRITHLPTGVIATSSEKSQIQNREKAMKVLKARLYDMKVQEEQQKYASQRKSAVGTGDRSERIRTYNYPQSRVTDHRIGLTLQKLGQIMEGHLEEIIDALTLSEQTDKLKELNNGEL

SEQ ID NO: 12381 - protein, 412 aa, Staphylococcus aureus; identical to SEQ ID NO: 5451

SEQ ID NO: 12382 - protein, 209 aa, Staphylococcus aureus; identical to SEQ ID NO: 5452

SEQ ID NO: 12383 - protein, 375 aa, Staphylococcus aureus
MKKIMTIFGTRPEAIKMAPLVKALEQEKMLEPIVVVTAQHREMLDSVLSTFEIKPKYDLNIMKSGQTLSEITSKSITQLEQVIQLEKPDMVLVHGDTMTTFAGGLTAFYNQVPIGHVEAGLRSYDKYSPFPEEVNRQLVGVLADLHFAPTKNAASHLLSEGKYSESVVVTGNTAIDAMKYTVDDNYKSNIMDKYHDKKFILMTAHRRENIGQPMENIFKAVRRLIDEYTDLALVYPMHKNPKVREVAQKILGSHDRIELIEPLDVVDFHNFAKKSYFILTDSGGIQEEAPSFNKPVLVLRSVTERPESVEAGTLKVIGPNKQNVYQAAKELIDDERLYHQMSEASNPYGDGFASERIVNHIKYYLNLITEKPSDF

SEQ ID NO: 12384 - protein, 451 aa, Staphylococcus aureus; identical to SEQ ID NO: 5633

SEQ ID NO: 12385 - protein, 242 aa, Staphylococcus aureus; identical to SEQ ID NO: 5439

SEQ ID NO: 12386 - protein, 173 aa, Staphylococcus aureus
MTETANLFVLGAAGGVEWGTVIVQVLTFIVLLALLKKFAWGPLKDVMDKRERDINRDIDDAEQAKLNAQKLEEENKQKLKETQEEVQKILEDAKVQARQQQEQIIHEANVRANGMIETAQSEINSQKERAIADINNQVSELSVLIASKVLRKEISEQDQKALVDKYLKEAGDK

SEQ ID NO: 12387 - protein, 502 aa, Staphylococcus aureus; identical to SEQ ID NO: 5441

SEQ ID NO: 12388 - protein, 421 aa, Staphylococcus aureus; identical to SEQ ID NO: 5303

SEQ ID NO: 12389 - protein, 2368 aa, Staphylococcus aureus; identical to SEQ ID NO: 5635

SEQ ID NO: 12390 - protein, 146 aa, Staphylococcus aureus
METIFDYNQIKQIIPHRQPFLLIDKVVEYEEGQRCVAIKQVSGNEPFFQGHFPEYAVMPGVLITEALAQTGAVAILNSEENKGKIALFAGIDKCRFKRQVVPGDTLTLEVEITKIKGPIGKGNAKATVDGQLACSCELTFAIQDVK

SEQ ID NO: 12391 - protein, 229 aa, Staphylococcus aureus
MEFSQKLYQAAKPIINDIYEDDFIQKMLLGNIQADALRHYLQADAAYLKEFTNLYALLIPKMNSMNDVKFLVEQIEFMVEGEVLAHDILAQIVGESYEEIIKTKVWPPSGDHYIKHMYFQAHSRENAIYTIAAMAPCPYIYAELAKRSQSDHKLNREKDTAKWFDFYSTEMDDIINVFEALMNKLAESMSDKELEQVKQVFLESCIHERRFFNMAMTLEQWEFGGKVND

SEQ ID NO: 12392 - protein, 229 aa, Staphylococcus aureus
MKQPINNGFAFKRWNNMFNQSYLNVYFICGTSDVPSHRTIHEVLEAALKAGITLFQFREKGESALKGNDKLVLAKELQHLCHQYDVPFIVNDDVSLAKEINADGIHVGQDDAKVKEIAQYFTDKIIGLSISDLGEYAKSDLTHVDYIGVGPIYPTPSKHDAHTPVGPEMIATFKEMNPQLPIVAIGGINTSNVAPIVEAGANGISVISAISKSENIEKTVNRFKDFFNN

SEQ ID NO: 12393 - protein, 368 aa, Staphylococcus aureus; identical to SEQ ID NO: 5636

SEQ ID NO: 12394 - protein, 118 aa, Staphylococcus aureus
MLTLCFMGYSIVRNVNEGVNAMTEQDNAHHSEQIKTNLKSRLNRIEGQVRAINRMIEEDVYCDDVLTQIRATRSALNSVAIKLLEQHMKSCIMNKVNQGAQEEAMEELLVTFQKLIKD

SEQ ID NO: 12395 - protein, 393 aa, Staphylococcus aureus
MILLRFKDANKSFNNWTKSILIYIKVANPDISLEENEMTKENICIVFGGKSAEHEVSILTAQNVLNAIDKDKYHVDIIYITNDGDWRKQNNITTEIKSTDELHLENGEALEISQLLKESSSGQPYDAVFPLLHGPNGEDGTIQGLFEVLDVPYVGNGVLSAASSMDKLVMKQLFEHRGLPQLPYISFLRSEYEKYEHNILKLVNDKLNYPVFVKPANLGSSVGISKCNNEAELKEGIKEAFQFDRKLVIEQGVNAREIEVAVLGNDYPEATWPGEVVKDVAFYDYKSKYKDGKVQLQIPADLDEDVQLTLRNMALEAFKATDCSGLVRADFFVTEDNQIYINETNAMPGFTAFSMYPKLWENMGLSYPELITKLIELAKERHQDKQKNKYKID

SEQ ID NO: 12396 - protein, 452 aa, Staphylococcus aureus
MINVTLKQIQSWIPCEIEDQFLNQEINGVTIDSRAISKNMLFIPFKGENVDGHRFVSKALQDGAGAAFYQRGTPIDENVSGPIIWVEDTLTALQQLAQAYLRHVNPKVIAVTGSNGKTTTKDMIESVLHTEFKVKKTQGNYNNEIGLPLTILELDNDTEISILEMGMSGFHEIEFLSNLAQPDIAVITNIGESHMQDLGSREGIAKAKSEITIGLKDNGTFIYDGDEPLLKPHVKEVENAKCISIGVATDNALVCSVDDRDTTGMSFTINNKEHYDLPILGKHNMKNATIAIAVGHELGLTYNTIYQNLKNVSLTGMRMEQHTLENDITVINDAYNASPTSMRAAIDTLSTLTGRRILILGDVLELGENSKEMHIGVGNYLEEKHIGVLYTFGNEAKYIYDSGQQHVEKAQHFNSKDDMIEVLTNDLKAHDRVLVKGSRGMKLEEVVNALIS

SEQ ID NO: 12397 - protein, 487 aa, Staphylococcus aureus
MGFKEPTPIQKDSIPYALQGIDILGQAQTGTGKTGAFGIPLIEKVVGKQGVQSLILAPTRELAMQVAEQLREFSRGQGVQVVTVFGGMPIERQIKALKKGPQIVVGTPGRVIDHLNRRTLKTDGIHTLILDEADEMMNMGFIDDMRFIMDKIPAVQRQTMLFSATMPKAIQALVQQFMKSPKIIKTMNNEMSDPQIEEFYTIVKELEKFDTFTNFLDVHQPELAIVFGRTKRRVDELTSALISKGYKAEGLHGDITQAKRLEVLKKFKNDQINILVATDVAARGLDISGVSHVYNFDIPQDTESYTHRIGRTGRAGKEGIAVTFVNPIEMDYIRQIEDANGRKMSALRPPHRKEVLQAREDDIKEKVENWMSKESESRLKRISTELLNEYNDVDLVAALLQELVEANDEVEVQLTFEKPLSRKGRNGKPSGSRNRNSKRGNPKFDSKSKRSKGYSSKKKSTKKFDRKEKSSGGSRPMKGRTFADHQK

SEQ ID NO: 12398 - protein, 147 aa, Staphylococcus aureus
MYKMSELFSNDNIFLNVNVNSQNEAIEKAGKALVDSGAVTDAYIQAMKDREQVVSTFMGNGLAIPHGTDEAKTNVIHSGLTLLQIPEGVDWDGEVVKVVVGIAGKDGEHLDLLSKIAITFSEEENVDRIVQAKSAEEIKQVFEEADA

SEQ ID NO: 12399 - protein, 678 aa, Staphylococcus aureus
MEKMHHVNKYFNQTMVIEALKMSFYKLNPKQLIKNPIMFVVEVGMILTLILICFPDIFGTSYLSRGYLITIFIILLITILFANFSEAFAEGRGKAQADSLRQAQSNLTARLIEENGAYRIVNATELKAGQNIRVENGETIPADGVVINGLATVDESAITGESAPVIKESGGDFDGVIGGTLVTSDWLEIRVESEAGTSFLDKMIALVEGAERNKTPNEIALFTLLTTLTIIFLVVIVTLYPIASYLHLILPIAMLIALTVCLIPTTIGGLLSAIGIAGMDRVTQFNVLAKSGRAVEVCGDVDVMILDKTGTITYGNRIASEFLPVNQQMWEKLIVAAYMSSIYDDTPEGKSIVRLAKQMYINELPKDIDGTYKPFTAETRMSGIITNEISVFKGAPNSMINLVKQQQGDIPLNIESICMDVSSKGGTPLIVIENNVMLGVIYLKDVIKDGLVERFAELRKMGIETVMCTGDNALTAATIAKEAGVDRFVAECKPEDKIKVIKDEQAKGHIVAMTGDGTNDAPALAQANIGLAMNSGTISAKEAANLIDLDSNPTKLIEVVKIGKQLLMTRGALTTFSLANDVAKYFAILPALMMSTIPEMTSLNIMHLSSPKSAIISALIFNALIIVALIPIAMKGVKVKGYSIDRIFINNMLIYGLGGLIVPFLGIKLIDMIVQFFV

SEQ ID NO: 12400 - protein, 186 aa, Staphylococcus aureus
MNTIRNSICLTIITMVLCGFLFPLAITLIGQIFFYQQANGSLITYDNRIVGSKLIGQHWTETRYFHGRPSAVDYNMNPEKLYKNGVSSGGSNESNGNTELIARVKHHVKFGNSNVTIDAATSSGSGLDPHITLENALKQAPRIADARHISTSRVTDLIQHRKQRGVLTNDYVNVLELNIALDKMKD

SEQ ID NO: 12401 - protein, 119 aa, Staphylococcus aureus; identical to SEQ ID NO: 5341

SEQ ID NO: 12402 - protein, 390 aa, Staphylococcus aureus
MGITGGSNMSDKYYRSAYMNVDLNAVASNFKVFSTLHPNKTVMAVVKANAYGLGSVKVARHLMENGATFFAVATLDEAIELRMHGITAKILVLGVLPAKDIDKAIQHRVALTVPSKQWLKEAIKNISGEQEKKLWLHIKLDTGMGRLGIKDTKTYQEVIEIIQRYEQLVFEGVFTHFACADEPGDMTTEQYQRFKDMVNEAIKPEYIHCQNSAGSLLMDCQFCNAIRPGISLYGYYPSEYVQQKVKVHLKPSVQLIANVVQTKTLQAGESVSYGATYTATDPTTIALLPIGYADGYLRIMQGSFVNVNGHQCEVIGRVCMDQTIVKVPDQVKAGDSVILIDNHRESPQSVEVAAEKQHTINYEVLCNLSRRLPRIYHDGDQRFVTNELLK

SEQ ID NO: 12403 - protein, 716 aa, Staphylococcus aureus
MDNQLINSIIEKYQFSKKQIEAVLTLLEEKNTVPFIARYRKEQTGGLDEVQIKQIDDEYQYMVNLQKRKEEVIKNIEQQGLLTEELKKDILKQNKLQRVEDLYRPFKQKKKTRATEAKRKGLEPLAIWMKARKHEVSIEEKAQQFINEEVQSVEDAIKGAQDMIAEQISDNPKYRTKILKDMYHQGVLTTSKKKNAEDEKGIFEMYYAYSEPIKRIANHRVLAVNRGEKEKVLSVKFEFDTTSVEDFIARQEINHNNVNRSYILEAIKDSLKRLIVPSIEREIHADLTEKAENHAIDVFSENLRNLLLQPPMKGKQILGVDPAFRTGCKLAVINPFGTFIAKGVIYPHPPVSKKEAAEKDFVQMVKAYDVQLIAIGNGTASRETEQFVADLIKKHQLPVQFIIVNEAGASVYSASEIARDEFPDFQVEERSAVSIGRRVQDPLSELVKIDPKSIGVGQYQHDVNQKALENALTFVVETAVNQVGVDVNTASSSLLQYVSGLSSQIAKNIIAYREENGAIKHNKELSKIKRLGAKTFEQSIGFLRIVDGSEPLDNTSIHPESYKVTYQLLDKLGFGGNDLGSDALKAKLNSLDMDELAIELQVGVPTLEDIIKSLKAPNRDPRDEFETPILKSDVLSIEDLKEGMKLSGTVRNVVDFGAFVDIGVKQDGLVHVSKLSKKFVKNPMDIVSVGDIVDVWIYSIDKNKDKVSLTMIDPHE

SEQ ID NO: 12404 - protein, 308 aa, Staphylococcus aureus
MTLAKLADRLGFKRIWFTEHHNVPAFACSSPELLMMHTLAQTNHIRVGSGGVMLPHYRPYKIAEHFRMMTALYPNRIDLGIGNNPGTTMVKQALDGINPKYDSYDESISLLRDYLTIKDKPSAHMLGVQPHIDHFPEMWLLSSSATSAKIAAELGIGLSVGTFLLPDINAIHAAKDNIDIYKKHFRASMIKMDAKVMASVFVIVADNEAEVAALQHALDVWLLGKLQFAEFEHFPSVDTAQKYKLNDRDKEMIQAHQARIIAGTQEQVKAQLDDFIATFEVDEVLVAPLIPGIEERCKTLKLLAEIYL

SEQ ID NO: 12405 - protein, 399 aa, Staphylococcus aureus
MYRYKPLLQSIHLPNGIKISNRFVLSPMTVNASTKEGYITKADLAYAARRSNSAGMQVTGAAYIEPYGQLFEYGFNIDHDACIPGLTNMASTMKQHGSLAIIQLAHAGRFSNQAILNFGKVYGPSPMTLHSPIEHDVIAMSQEKINSIIQQYRDATLRAIKAGFDGVEISIAQRLLIQTFFSTFSNKRTDHYGADSLKNRARLCLEVMRAVQEVIDKEAPDNFILGFRATPEETRGSDLGYTIDEFNQLIDWVMDVSNIQYLAIASWGRHIYQNTSRTPGEHFGRPVNQIVYEHLAGRIPLIASGGINSPESALDALQHADMVGMSSPFVTEPDFVHKLAEQRPHDIDLEFSMEDLENLAIPRAAFKDIVKMMDYGEGLKKHTRDALRQLEQNYHDSSS

SEQ ID NO: 12406 - protein, 513 aa, Staphylococcus aureus
MEMAKEQELILVLDFGSQYNQLITRRIREMGVYSELHDHEISIEEIKKMNPKGIILSGGPNSVYEEGSFTIDPEIYNLGIPVLGICYGMQLTTKLLGGKVERANEREYGKAIINAKSDELFAGLPAEQTVWMSHSDKVIEIPEGFEVIADSPSTDYAAIEDKKRRIYGVQFHPEVRHTEYGNDLLNNFVRRVCDCKGQWTMENFIEIEIEKIRQRVGDRRVLCAMSGGVDSSVVAVLLHKAIGDQLTCIFVDHGLLRKGEGDMVMEQFGEGFNMNIIRVNAKDRFMNKLKGVSDPEQKRKIIGNEFVYVFDDEASKLKGVDFLAQGTLYTDVIESGTKTAQTIKSHHNVGGLPEDMEFELIEPINTLFKDEVRKLGIELGIPEHLVWRQPFPGPGLGIRVLGEITEDKLEIVRESDAILRQVIREEGLEREIWQYFTVLPNIQSVGVMGDYRTYDHTVGIRAVTSIDGMTSDFARIDWEVLQKISSRIVNEVDHVNRVVYDITSKPPSTIEWE

SEQ ID NO: 12407 - protein, 904 aa, Staphylococcus aureus
MKGMTTQLNINSVIENAKRVITPLSPISIFAARNPWEGLEADTFEDVAKWLRDVRDVDIFPNKALIESAVARGELDESVFNQLVTDMLLEHHYNIPQHYINLYIDNIKTLKDVPASYMNHSNVDVVADLLLEKSKRDMAESYHHYDVRPMSDAIIDEQGMPLSEQVNRQMIKWTKLYIDQFLSSWTMPKREQSFYHAWLHLAQHDHSFTKAQRQVIKGLPNDPKMTIESVLNHFSIVQEDYQAYFEGHLLALPGWAGMLYYRSQQHHFEQHLLTDYLAIRLVVEQLLVGDEFKSVTKDCESRSENWFKQTVASWCYYSDMPSDVLLQHDVNEIKTFIHFAATMNKNVFKNLWLIAWEMTYESQLKQKIKAGHESLAGALDAIQVNVSENDNANQSHSVSLNATQAVDENNSELNQVGTSTKAQIAFCIDVRSEPFRRHIEAAGPFETIGIAGFFGLPIQKEAVDEQFKHDSLPVMVPPAYRIKEFADRYDMNVYRQQQQTMSSMFYTFKLMKNNVMPSLLLPELSGPFLSLSTIVNTIMPRKSRASLQKIKQKWLKKPETKLTIDREFDRTSDLPVGFTEQEQIDFALQALKLMDLTEAFAPFVVLAGHASHSHNNPHHASLECGACGGASSGFNAKLLAMICNRLNVRQGLKQAGVVIPETTVFAAAEHYTSTDTLAWVYVPDTLSALALDAYESLNDAMPMISEHANRERLDKLSTIGRVNHPVEEAQRFASDWSEVRPEWGLAKNASFIIGRRQLTKGIDLEGRTFLHNYDWCKDKDGTLLNTIISGPALVAQWINLQYYASTVAPHFYGSGNKATQTVTSGVGVMQGNASDLMYGLSWQSVMAADRTMYHSPIRLLVVVQAPDYVVARLLANNEHFARKVSNHWLRLMSVNEEGRFKSWI

SEQ ID NO: 12408 - protein, 318 aa, Staphylococcus aureus; identical to SEQ ID NO: 5759

SEQ ID NO: 12409 - protein, 189 aa, Staphylococcus aureus; identical to SEQ ID NO: 5318

SEQ ID NO: 12410 - protein, 494 aa, Staphylococcus aureus
MLSFQLLFSLFVIALIIALISGLLFLAPVMPMRYIKLHLYILVMPVLFAVIGFFGIHGQHVLGPFKIDRLSWLLAGFVMALGFIIQKFSMRYLLGDHHYRHYFPLFTAITSFASLAWMSEDLRLMALCWGMTLLCLTLLMNVNRFWKVPRESAKLSSMTFLCGWLAFVGAIVTIYIATGEWRVPQHIAHPTWSLLTNVLLVLAVMIPAAQFPFHRWLIESVTAPTPVSAIMHAGIVNAGGVILTRFAPIFDNGFALSLLLILSSISVLLGSGISLVQVDYKRQLVGSTMSQMGFMLVQCALGVYSAAIIHLILHGIFKATLFLQSGSIVKRFNIPKQASAKDAYGWIVMGRVLAIIVAFLFWMSSDRSAYEVLSALILAWSLLVSWNQMVAFSKGRMARLVGMILISIVTFIYIITHNYFYDVLQNITTHATTPPTISVIISVVILIFGSLLSIWVARHRYSKAFAVLYVWLVNLGEARSKAIESHPNYLKKYL

SEQ ID NO: 12411 - protein, 80 aa, Staphylococcus aureus
MAGGPRRGGRRRKKVCYFTANGITHIDYKDTELLKRFISERGKILPRRVTGTSAKYQRMLTTAIKRSRHMALLPYVKEEQ

SEQ ID NO: 12412 - protein, 167 aa, Staphylococcus aureus; identical to SEQ ID NO: 5744

SEQ ID NO: 12413 - protein, 98 aa, Staphylococcus aureus
MRTYEVMYIVRPNIEEDAKKALVERFNGILATEGAEVLEAKDWGKRRLAYEINDFKDGFYNIVRVKSDNNKATDEFQRLAKISDDIIRYMVIREDEDK

SEQ ID NO: 12414 - protein, 365 aa, Staphylococcus aureus; identical to SEQ ID NO: 5593

SEQ ID NO: 12415 - protein, 293 aa, Staphylococcus aureus
MDQVMSIISSLFEPLTKIETYESVATKLAMIIIYIIVALIVIKILDKMIAQGFKIQNKSKKGNKKRSKTLISLVQNVVKYIVWFIVITTILSKFGISVEGVIASAGVVGLAVGFGAQTIVKDVITGFFIIFESQFDVGDYVKINNGGTTVAEGTVKSIGLRSTRINTISGELTILPNSSMGEITNYSITNGTAIVKIPVSVDENIDNVEKKLNKLFTSLRSKYYLFVSDPVVIGIDAFEDTRVILRVSAETIPGEGFSGARIIRKEVQKMFLQEGIKTPQPIMTPFNHSENGV

SEQ ID NO: 12416 - protein, 367 aa, Staphylococcus aureus
MKDTQLAQITLTDDSTGAIANPIHLSTAYKHPKLGQSTGFDYTRTKNPTRSTFETCFAKLEHGIASFATSSGMSAIQLICNLFKPHDEILVSFDLYGGTFRLFEFYEQQYNIKFKYVDFTDYEQVEKEITDKTVALFIEPISNPQMIAIDVKPYYQLCKAKGLLSIIDNTFLTPYLSTPLAEGADIVLHSATKYIGGHNDVLAGVVTVKDESLAQQLFDFHNMTGATLSPIDSYLLLRGLKTLHLRIERAQSNARKLAKKCQSLQAIDEVLYSGQTGMLSLRLNKAYSVAKLLENLDICIFAESLGGTETLVTFPYTQTHVDMPDAEKDKRGIDEYLIRLSLGVENYEDIERDIIQALDKAQIGEIV

SEQ ID NO: 12417 - protein, 393 aa, Staphylococcus aureus
MTRVVLAAAYRTPIGVFGGAFKDVPAYDLGATLIEHIIKETGLNPSEINEVIIGNVLQAGQGQNPARIAAMKGGLPETVPAFTVNKVCGSGLKSIQLAYQSIVTGENDIVLAGGMENMSQSPMLVNNSRFGFKMGHQSMVDSMVYDGLTDVFNQYHMGITAENLVEQYGISREEQDTFAVNSQQKAVRAQQNGEFDSEIVPVSIPQRKGEPIVVTKDEGVRENVSVEKLSRLRPAFKKDGTVTAGNASGINDGAAMMLVMSEDKAKELNIEPLAVLDGFGSHGVDPSIMGIAPVGAVEKALKRSKKELSGIDVFELNEAFAAQSLAVDRELKLPPEKVNVKGGAIALGHPIGASGARVLVTLLHQLNDEVETGLTSLCIGGGQAIAAVVSKYK

SEQ ID NO: 12418 - protein, 409 aa, Staphylococcus aureus
MTNYEQVNDSTQFSRRTFLKMLGIGGAGVAIGASGVGSMWSFKSMFNTPEDPEKDAYEFYGKVQPGITTPTQKTCNFVALDLKSKDRDAIKAMFKKWTVMADRMMDGDTVGKTSNNPLMPPVDTGESIGLGASKLTITFGISKSLMKKIGLSSKIPDAFKDLPHFPNDQLIDDYSDGDIMIQACSNDSQVSFHAVHNLVRPFRDIVKVRWSQSGFISAKGKETPRNLMAFKDGTINPRKSNQLKDYVFIDDGWAKHGTYCVVRRIQIHIETWDRTALEEQEATFGRKRHSGAPLTGGKEFDEIDLKAKDSHGEYIIDKDAHTRLAKEANTSILRRAFNYVDGTDDRTGNFETGLLFIAFQKATQQFIDIQNNLGSNDKLNEYITHRGSASFLVLPGVSKGGYLGETLFD

SEQ ID NO: 12419 - protein, 525 aa, Staphylococcus aureus
MIQAQLDQYHLKLNYVHNKGFNIIGEEDHYRKAYAHFIHQYMKQAAPFIEADIFNSESIALVRRAIIKTLNSENYHLVQSAIDGLIYHILIAIQRLNENFSFDIPINEIDKWRHTNQYAIALKMIENLERSCNVTFPESEIIFITLHLLGSKMTEHTASSITFEYHDLSQNIHELITYVSQELGIDMSKDNKLHTSLITHIKPAIHRIKYDMLQPNPLRQEVMRRYPQIIEAVSKHISPIEQDAAIRFNEDELTYITIHFASSIERVATHKQSMIKVVLLCGSGIGTSQLLKSKLNHLYPEFHIWDAYSIYQLEESRLLQDNIDYVISTVPCEISTVPVIHVDPFINQQSRQKLNQIINDSREQRVMKMATDGKSLSDLLPEHRIIINKQPLSIESAITVAVQPLINDGIVNSNYTAAILKQLEQFGSYMVISPHIALIHAGTDYVQNGVGFALTYFTERIIFGSKANDPVHLVITLATDHPNAHLKALGQLSECLSNDLYRQDFLDGNIFKIKQHIALTMTKEV

SEQ ID NO: 12420 - protein, 147 aa, Staphylococcus aureus
MSLDILSTTRIIVKEQVNDWTEAITIASQPLLQEQIIEQGYVQAMIDSVNEFGPYIVIAPEIAIAHARPNNDVHQVGLSLLKLNQHVAFCDEDHYASLIFVLSAIDNHSHLSVLQNLATVLGDNQTVQQLLTATNAQDIKNILKEHD

SEQ ID NO: 12421 - protein, 448 aa, Staphylococcus aureus
MQAILNFIVDILSQPAILVALIAFIGLIVQKKPAATITSGTIKTILGFLILSAGADVVVRSLEPFGKIFQHAFGVQGIVPNNEAIVSLALKDFGTTAALIMVCGMIVNILIARFTNLKYIFLTGHHTFYMAAFLAIILTVSHIKGWLTIVIGALVLGLIMAVLPALLQPTMRKITGNDQVALGHFGSISYFAAGAVGQLFKGKSKSTEEIKFPKGLSFLRESTISISITMALLYFIACLFAGVSYVHESISDGQNFIVFSLIQGVTFAAGVFIILTGVRLILAEIVPAFKGISEKLVPNSKPALDCPIVFPYAQNAVLIGFFVSFITGVIGMFILFLFGGVVILPGVVAHFFLGATAAVFGNARGGIKGAVAGAALNGILITFLPLLFLPFLGELGGAATTFSDTDFLAVGIVFGNAVKYMGLFGAILFIIIVGATAILLKGRQKPQQ

SEQ ID NO: 12422 - protein, 110 aa, Staphylococcus aureus
MKKLANYLWVEKVGDLYVFSMTPELQDDIGTVGYVEFVSPDEVKVDDEIVSIEASKTVIDVQTPLSGTIIERNTKAEEEPTILNSEKPEENWLFKLDDVDKEAFLALPEA

SEQ ID NO: 12423 - protein, 449 aa, Staphylococcus aureus
MIFECMACGYQSPKWMGKCPNCGAWNQMEEIVEKAANPKHGVKTKELTGKVQKLNSIKHETTPRVLTDSAEFNRVLGGGIVSGSLVLIGGDPGIGKSTLLLQICASLSQKKKVLYITGEESLSQTKLRAERLDEDSSELQVLAETDLEVIYQTVKEEQPDLLVVDSIQTIYHPEISSAPGSVSQVRESTQSLMNIAKQMNIATFIVGHVTKEGQIAGPRLLEHMVDTVLYFEGDEHHAYRILRAVKNRFGSTNEMGIFEMKQSGLKGVNNPSEMFLEERSTNVPGSTIVATMEGTRPLLIEVQALVTPTTFNNPRRMATGIDHNRLSLLMAVLEKKENYLLQQQDAYIKVAGGVKLTEPAVDLSVIVATASSFKDKAVDGLDCYIGEVGLTGEVRRVSRIEQRVQEAAKLGFKRVIIPKNNIGGWTYPEGIQVIGVTTVHEALSFALHS

SEQ ID NO: 12424 - protein, 818 aa, Staphylococcus aureus
MLFGRLTERAQRVLAHAQEEAIRLNHSNIGTEHLLLGLMKEPEGIAAKVLESFNITEDKVIEEVEKLIGHGQDHVGTLHYTPRAKKVIELSMDEARKLHHNFVGTEHILLGLIRENEGVAARVFANLDLNITKARAQVVKALGNPEMSNKNAQASKSNNTPTLDSLARDLTVIAKDGTLDPVIGRDREITRVIEVLSRRTKNNPVLIGEPGVGKTAIAEGLAQAIVNNEVPETLKDKRVMSLDMGTVVAGTKYRGEFEERLKKVMEEIQQAGNVILFIDELHTLVGAGGAEGAIDASNILKPALARGELQCIGATTLDEYRKNIEKDAALERRFQPVQVDEPSVVDTVAILKGLRDRYEAHHRINISDEAIEAAVKLSNRYVSDRFLPDKAIDLIDEASSKVRLKSHTTPNNLKEIEQEIEKVKNEKDAAVHAQEFENAANLRDKQTKLEKQYEEAKNEWKNAQNGMSTSLSEEDIAEVIAGWTGIPLTKINETESEKLLSLEDTLHERVIGQKDAVNSISKAVRRARAGLKDPKRPIGSFIFLGPTGVGKTELARALAESMFGDDDAMIRVDMSEFMEKHAVSRLVGAPPGYVGHDDGGQLTEKVRRKPYSVILFDEIEKAHPDVFNILLQVLDDGHLTDTKGRTVDFRNTIIIMTSNVGAQELQDQRFAGFGGSSDGQDYETIRKTMLKELKNSFRPEFLNRVDDIIVFHKLTKEELKEIVTMMVNKLTNRLSEQNINIIVTDKAKDKIAEEGYDPEYGARPLIRAIQKTIEDNLSELILDGNQIEGKKVTVDHDGKEFKYDIAEQTSETKTPSQA

SEQ ID NO: 12425 - protein, 340 aa, Staphylococcus aureus
MRCNMMTHNIHDNISQWMKSNEETPIVMSSRIRLARNLENHVHPLMYATENDGFRVINEVQDALPNFELMRLDQMDQQSKMKMVAKHLISPELIKQPAAAVLVNDDESLSVMINEEDHIRIQAMGTDTTLQALYNQASSIDDELDRSLDISYDEQLGYLTTCPTNIGTGMRASVMLHLPGLSIMKRMTRIAQTINRFGYTIRGIYGEGSQVYGHTYQVSNQLTLGKSELEIIETLTEVVNQIIHEEKQIRQKLDTYNQLETQDRVFRSLGILQNCRMITMEEASYRLSEVKLGIDLNYIELQNFKFNELMVAIQSPFLLDEEDDKSVKEKRADILREHIK

SEQ ID NO: 12426 - protein, 188 aa, Staphylococcus aureus
MLCENCQLNEAELKVKVTSKNKTEEKMVCQTCAEGHHPWNQANEQPEYQEHQDNFEEAFVVKQILQHLATKHGINFQEVAFKEEKRCPSCHMTLKDIAHVGKFGCANCYATFKDDIIDIVRRVQGGQFEHVGKTPHSSHKKIALKRKIEEKNEYLKKLIEIQDFEEAAIVRDEIKALKAESEVQHDDA

SEQ ID NO: 12427 - protein, 186 aa, Staphylococcus aureus
MKIGVLALQGAVREHIRHIELSGHEGIAVKKVEQLEEIEGLILPGGESTTLRRLMNLYGFKEALQNSTLPMFGTCAGLIVLAQDIVGEEGYLNKLNITVQRNSFGRQVDSFETELDIKGIATDIEGVFIRAPHIEKVGQGVDILCKVNEKIVAVQQGKYLGVSFHPELTDDYRVTDYFINHIVKKA

SEQ ID NO: 12428 - protein, 295 aa, Staphylococcus aureus
MSKIIGSDRVKRGMAEMQKGGVIMDVVNAEQARIAEEAGAVAVMALERVPSDIRAAGGVARMANPKIVEEVMNAVSIPVMAKARIGHITEARVLEAMGVDYIDESEVLTPADEEYHLRKDQFTVPFVCGCRNLGEAARRIGEGAAMLRTKGEPGTGNIVEAVRHMRQVNSEVSRLTVMNDDEIMTFAKDIGAPYEILKQIKDNGRLPVVNFAAGGVATPQDAALMMELGADGVFVGSGIFKSEDPEKFAKAIVQATTHYQDYELIGRLASDLGTAMKGLDINQLSLEERMQERGW

SEQ ID NO: 12429 - protein, 553 aa, Staphylococcus aureus; identical to SEQ ID NO: 5497

SEQ ID NO: 12430 - protein, 336 aa, Staphylococcus aureus
MRAAVVTKDHKVSIEDKKLRALKPGEALVQTEYCGVCHTDLHVKNADFGDVTGVTLGHEGIGKVIEVAEDVESLKIGDRVSIAWMFESCGRCEYCTTGRETLCRSVKNAGYTVDGAMAEQVIVTADYAVKVPEKLDPAAASSITCAGVTTYKAVKVSNVKPGQWLGVFGIGGLGNLALQYAKNVMGAKIVAFDINDDKLAFAKELGADAIINSKDVDPVAEVMKLTDNKGLDATVVTSVAKTPFNQAVDVVKAGARVVAVGLPVDKMNLDIPRLVLDGIEVVGSLVGTRQDLREAFEFAAENKVTPKVQLRKLEEINDIFEEMENGTITGRMVIKF

SEQ ID NO: 12431 - protein, 178 aa, Staphylococcus aureus
MITVLFGGSRPNGNTAQLTKFALQDLEYQWIDVTQHQFKPIRDVRHTAETITSYDDDYLPILDKILASDTIIFASPVYWYSISAPLKAFIEHWSETLQDKRYPNFKAQMAEKDFRVILVGGDCPKIKAKPAITQMKYSLDFLGATLNGYIIGTAEKPGDIMKDNYALARATEWNSILQ

SEQ ID NO: 12432 - protein, 312 aa, Staphylococcus aureus
MKQFVNLGKSDVEVFPIALGTNAVGGHNLYPNLDEEQGKEVVRQAINHGINLLDTAYIYGPERSEELVGEVVKEYPREQIKIATKGSHEFDENQEVHQNNQPEYLKQQVENSLKRLQTDYIDLYYIHFPDDNTPKDQAVAALQELKEQGKIKAIGVSNFTLDQLKEANKDGYVDVVQLEYNLLHRENEAVLQYCVDHQITFIPYFPLASGILAGKYDENTKFSDHRTTRRDFKPGVFEENVRRVKALESLAAAHQTSIANIVLAFYLTRPAIDVIIPGAKRAEQVIENIKAADIVLSDDEIQYIDELFPIED

SEQ ID NO: 12433 - protein, 117 aa, Staphylococcus aureus
MGSNMKNTFLICDECQAVNIRTLQKKLEKLDPDAEIVIGCQSYCGPGRRKTFTFVNNRPLAALTEEELIEKVSQQLKKPRDPEEEERLRKRHEERKRRKEEQDRKLKEKLEKRKAQQ

SEQ ID NO: 12434 - protein, 298 aa, Staphylococcus aureus
MNNSISVTLEKFYTETKVTFNDQLTQDQFWLNGEKVSGKELEKISKYMDIVRNRAGIDWYAEIESDNFVPTAAGLASSASAYAALAAACNQALDLQLSDKDLSRLARIGSGSASRSIYGGFAEWEKGYNDETSYAVPLESNHFEDDLAMIFVVINQHSKKVPSRYGMSLTRNTSRFYQYWLDHIDEDLAEAKAAIQDKDFKRLGEVIEENGLRMHATNLGSTPPFTYLVQESYDVMALVHECREAGYPCYFTMDAGPNVKILVEKKNKQQIIDKLLTQFDNNQIIDSDIIATGIEIIE

SEQ ID NO: 12435 - protein, 278 aa, Staphylococcus aureus
MDLASKYFNGVNWRYIDHSSGLEPMQSFAFDDTFCESVGKDISDNVVRTWIHQHTVILGIHDSRLPFLKDGIDYLTNEIGYNAIVRNSGGLGVVLDQGVLNISLMFKGQTETTIDEAFTVMYLLISKMFEDENVDIDTMEIEHSYCPGKFDLSIDGKKFAGISQRRVRGGIAVQIYLCVEGSGSERALMMQTFYEHALKGEVTKFKYPEIEPSCMASLETLLNKTITVQDVMFLLLYAIKDLGGVLNMTPITQEEWQRYDTYFDKMIERNKKMIDQMQ

SEQ ID NO: 12436 - protein, 328 aa, Staphylococcus aureus
MADLLNVLKDKLSGKNVKIVLPEGEDERVLTAATQLQATDYVTPIVLGDETKVQSLAQKLNLDISNIELINPATSELKAELVQSFVERRKGKATEEQAQELLNNVNYFGTMLVYAGKADGLVSGAAHSTGDTVRPALQIIKTKPGVSRTSGIFFMIKGDEQYIFGDCAINPELDSQGLAEIAVESAKSALSFGMDPKVAMLSFSTKGSAKSDDVTKVQEAVKLAQQKAEEEKLEAIIDGEFQFDAAIVPGVAEKKAPGAKLQGDANVFVFPSLEAGNIGYKIAQRLGGYDAVGPVLQGLNSPVNDLSRGCSIEDVYNLSIITAAQALQ

SEQ ID NO: 12437 - protein, 292 aa, Staphylococcus aureus
MTEFDLSTREGRWKHFGSVDPIEGTKPTTKNEMTDLQSTHKDFLFEIEEVGIKNLVYPVLVDQYQTAGTFSFSTSLTKDEKGINMSRIIESVEKHYDNGIELEFNTLYQVLRTLQTNMKQNAAGVDVSGKWFFDRYSPTTNIKAVGNADVTYGLAIDGDKVTRKELTIEATVTTLCPCSKEISEYSAHNQRGVVTVKTYINKDQDIVDDYKNKILDAMEANASSILYPILKRPDEKRVTERAYENPRFVEDLIRLIAADLVEFDWLDGFDIECRNEESIHQHDAFAKLKYRK

SEQ ID NO: 12438 - protein, 932 aa, Staphylococcus aureus; identical to SEQ ID NO: 5578

SEQ ID NO: 12439 - protein, 227 aa, Staphylococcus aureus
MEWILFDKDGTLIEFDRSWEKIGVRFVQSLLETFPVHNKEAALRQLGVIKESIDPKSVMGSGSLQQIIQAFNDVTGQDTTDWSKSTSQKLVDERIPEINWVEGVKEALIDLKAKGYQLGIVTSDTKKGVEQFLAHTNATSLFDLIISTEADAYEKPNPKVLSPLFEKYNVDPQKVAIVGDTANDMKTASNANLGMAIGVLTGIATKEELHEADIILNSAADILEALN

SEQ ID NO: 12440 - protein, 292 aa, Staphylococcus aureus
MSQDVNELSKQPTPDKAEDNAFFPSPYSLSQYTAPKTDFDGVEHKGAYKDGKWKVLMIAAEERYVLLENGKMFSTGNHPVEMLLPLHHLMEAGFDVDVATLSGYPAKLELWAMPTEDEAVISTYNKLKEKLKQPKKLADVIKNELGPDSDYLSVFIPGGHAAVVGISESEDVQQTLDWALENDRFIVTLCHGPAALLSAGLNREKSPLEGYSVCVFPDSLDEGANIEIGYLPGRLKWLVADLLTKQGLKVVNDDMTGRTLKDRKLLTGDSPLASNELGKLAVNEMLNAIQNK

SEQ ID NO: 12441 - protein, 395 aa, Staphylococcus aureus
MVQSLHEFLEENINYLKENGLYNEIDTIEGANGPEIKINGKSYINLSSNNYLGLATNEDLKSAAKAAIDSHGVGAGAVRTINGTLDLHDELEETLAKFKGTEAAIAYQSGFNCNMAAISAVMNKNDAILSDELNHASIIDGCRLSKAKIIRVNHSDMDDLRAKAKEAVESGQYNKVMYITDGVFSMDGDVAKLPEIVEIAEEFGLLTYVDDAHGSGVMGKGAGTVKHFGLQDKIDFQIGTLSKAIGVVGGYVAGTKELIDWLKAQSRPFLFSTSLAPGDTKAITEAVKKLMASTELHDKLWDNAQYLKNGLSKLGYDTGESETPITPVIIGDEKTTQEFSKRLKDEGVYVKSIVFPTVPRGTGRVRNMPTAAHTKDMLDEAIAAYEKVGKEMKLI

SEQ ID NO: 12442 - protein, 394 aa, Staphylococcus aureus; identical to SEQ ID NO: 5574

SEQ ID NO: 12443 - protein, 715 aa, Staphylococcus aureus
MLRASPYLSYLFSNINWKEKKYMAREFSLEKTRNIGIMAHIDAGKTTTTERILYYTGRIHKIGETHEGASQMDWMEQEQDRGITITSAATTAAWEGHRVNIIDTPGHVDFTVEVERSLRVLDGAVTVLDAQSGVEPQTETVWRQATTYGVPRIVFVNKMDKLGANFEYSVSTLHDRLQANAAPIQLPIGAEDEFEAIIDLVEMKCFKYTNDLGTEIEEIEIPEDHLDRAEEARASLIEAVAETSDELMEKYLGDEEISVSELKEAIRQATTNVEFYPVLCGTAFKNKGVQLMLDAVIDYLPSPLDVKPIIGHRASNPEEEVIAKADDSAEFAALAFKVMTDPYVGKLTFFRVYSGTMTSGSYVKNSTKGKRERVGRLLQMHANSRQEIDTVYSGDIAAAVGLKDTGTGDTLCGEKNDIILESMEFPEPVIHLSVEPKSKADQDKMTQALVKLQEEDPTFHAHTDEETGQVIIGGMGELHLDILVDRMKKEFNVECNVGAPMVSYRETFKSSAQVQGKFSRQSGGRGQYGDVHIEFTPNETGAGFEFENAIVGGVVPREYIPSVEAGLKDAMENGVLAGYPLIDVKAKLYDGSYHDVDSSEMAFKIAASLALKEAAKKCDPVILEPMMKVTIEMPEEYMGDIMGDVTSRRGRVDGMEPRGNAQVVNAYVPLSEMFGYATSLRSNTQGRGTYTMYFDHYAEVPKSIAEDIIKKNKGE

SEQ ID NO: 12444 - protein, 156 aa, Staphylococcus aureus; identical to SEQ ID NO: 5237

SEQ ID NO: 12445 - protein, 149 aa, Staphylococcus aureus
MGLKSEERRTYHMPTINQLVRKPRQSKIKKSDSPALNKGFNSKKKKFTDLNSPQKRGVCTRVGTMTPKKPNSALRKYARVRLSNNIEINAYIPGIGHNLQEHSVVLVRGGRVKDLPGVRYHIVRGALDTSGVDGRRQGRSLYGTKKPKN

SEQ ID NO: 12446 - protein, 1198 aa, Staphylococcus aureus
MKIGLASPEKIRSWSFGEVKKPETINYRTLKPEKDGLFCERIFGPTKDWECSCGKYKRVRYKGMVCDRCGVEVTKSKVRRERMGHIELAAPVSHIWYFKGIPSRMGLLLDMSPRALEEVIYFASYVVVDPGPTGLEKKTLLSEAEFRDYYDKYPGQFVAKMGAEGIKDLLEEIDLDEELKLLRDELESATGQRLTRAIKRLEVVESFRNSGNKPSWMILDVLPIIPPEIRPMVQLDGGRFATSDLNDLYRRVINRNNRLKRLLDLGAPGIIVQNEKRMLQEAVDALIDNGRRGRPVTGPGNRPLKSLSHMLKGKQGRFRQNLLGKRVDYSGRSVIAVGPSLKMYQCGLPKEMALELFKPFVMKELVQREIATNIKNAKSKIERMDDEVWDVLEEVIREHPVLLNRAPTLHRLGIQAFEPTLVEGRAIRLHPLVTTAYNADFDGDQMAVHVPLSKEAQAEARMLMLAAQNILNPKDGKPVVTPSQDMVLGNYYLTLERKDAVNTGAIFNNTNEVLKAYANGFVHLHTRIGVHASSFNNPTFTEEQNKKILATSVGKIIFNEIIPDLFAYINEPTQENLERKTPNRYFIDPTTLGEGGLKEYFENEELIEPFNKKFLGNIIAEVFNRFSITDTSMMLDRMKDLGFKFSSKAGITVGVADIVVLPDKQQILDEHEKLVDRITKQFNRGLITEEERYNAVVEIWTDAKDQIQGELMQSLDKTNPIFMMSDSGARGNASNFTQLAGMRGLMAAPSGKIIELPITSSFREGLTVLEYFISTHGARKGLADTALKTADSGYLTRRLVDVAQDVIVREEDCGTDRGLLVSDIKEGTEMIEPFIERIEGRYSKETIRHPETDEIIIRPDELITPEIAKKITDAGIEQMYIRSAFTCNARHGVCEKCYGKNLATGEKVEVGEAVGTIAAQSIGEPGTQLTMRTFHTGGVAGSDITQGLPRIQEIFEARNPKGQAVITEIEGVVEDIKLAKDRQQEIVVKGANETRSYLASGTSRIIVEIGQPVQRGEVLTEGSIEPKNYLSVAGLNATESYLLKEVQKVYRMQGVEIDDKHVEVMVRQMLRKVRIIEAGDTKLLPGSLVDIHNFTDANREAFKHRKRPATAKPVLLGITKASLETESFLSAASFQETTRVLTDAAIKGKRDDLLGLKENVIIGKLIPAGTGMRRYSDVKYEKTAKPVAEVESQTEVTE

SEQ ID NO: 12447 - protein, 1136 aa, Staphylococcus aureus
MFRDISPIEDFTGNLSLEFVDYRLGEPKYDLEESKNRDATYAAPLRVKVRLIIKETGEVKEQEVFMGDFPLMTDTGTFVINGAERVIVSQLVRSPSVYFNEKIDKNGRENYDATIIPNRGAWLEYETDAKDVVYVRIDRTRKLPLTVLLRALGFSSDQEIVDLLGDNEYLRNTLEKDGTENTEQALLEIYERLRPGEPPTVENAKSLLYSRFFDPKRYDLASVGRYKTNKKLHLKHRLFNQKLAEPIVNTETGEIVVEEGTVLDRRKIDEIMDVLESNANSEVFELHGSVIDEPVEIQSIKVYVPNDEEGRTTTVIGNAFPDSEVKCITPADIIASMSYFFNLLSGIGYTDDIDHLGNRRLRSVGELLQNQFRIGLSRMERVVRERMSIQDTESITPQQLINIRPVIASIKEFFGSSQLSQFMDQANPLAELTHKRRLSALGPGGLTRERAQMEVRDVHYSHYGRMCPIETPEGPNIGLINSLSSYARVNEFGFIETPYRKVDLDTHAITDQIDYLTADEEDSYVVAQANSKLDENGRFMDDEVVCRFRGNNTVMAKEKMDYMDVSPKQVVSAATACIPFLENDDSNRALMGANMQRQAVPLMNPEAPFVGTGMEHVAARDSGAAITAKHRGRVEHVESNEILVRRLVEENGVEHEGELDRYPLAKFKRSNSGTCYNQRPIVAVGDVVEYNEILADGPSMELGEMALGRNVVVGFMTWDGYNYEDAVIMSERLVKDDVYTSIHIEEYESEARDTKLGPEEITRDIPNVSESALKNLDDRGIVYIGAEVKDGDILVGKVTPKGVTELTAEERLLHAIFGEKAREVRDTSLRVPHGAGGIVLDVKVFNREEGDDTLSPGVNQLVRVYIVQKRKIHVGDKMCGRHGNKGVISKIVPEEDMPYLPDGRPIDIMLNPLGVPSRMNIGQVLELHLGMAAKNLGIHVASPVFDGANDDDVWSTIEEAGMARDGKTVLYDGRTGEPFDNRISVGVMYMLKLAHMVDDKLHARSTGPYSLVTQQPLGGKAQFGGQRFGEMEVWALEAYGAAYTLQEILTYKSDDTVGRVKTYEAIVKGENISRPSVPESFRVLMKELQSLGLDVKVMDEQDNEIEMTDVDDDDVVERKVDLQQNDAPETQKEVTD

SEQ ID NO: 12448 - protein, 202 aa, Staphylococcus aureus; identical to SEQ ID NO: 5521

SEQ ID NO: 12449 - protein, 122 aa, Staphylococcus aureus
MANHEQIIEAIKEMSVLELNDLVKAIEEEFGVTAAAPVAVAGAAGGADAAAEKTEFDVELTSAGSSKIKVVKAVKEATGLGLKDAKELVDGAPKVIKEALPKEEAEKLKEQLEEVGATVELK

SEQ ID NO: 12450 - protein, 166 aa, Staphylococcus aureus
MSAIIEAKKQLVDEIAEVLSNSVSTVIVDYRGLTVAEVTDLRSQLRETGVEYKVYKNTMVRRAAEKAGIEGLDEFLTGPTAIATSSEDAVAAAKVISGFAKDHEALEIKSGVMEGNVITAEEVKTVGSLPSHDGLVSMLLSVLQAPVRNFAYAVKAIGEQKEENAE

SEQ ID NO: 12451 - protein, 143 aa, Staphylococcus aureus
MHIVAKKVDKVVKLQIPAGKANPAPPVGPALGQAGVNIMGFCKEFNARTQDQAGLIIPVEISVYEDRSFTFITKTPPAPVLLKKAAGIEKGSGEPNKTKVATVTKDQVREIANSKMQDLNAADEEAAMRIIEGTARSMGIVVE

SEQ ID NO: 12452 - protein, 182 aa, Staphylococcus aureus; identical to SEQ ID NO: 5254

SEQ ID NO: 12453 - protein, 60 aa, Staphylococcus aureus; identical to SEQ ID NO: 5255

SEQ ID NO: 12454 - protein, 174 aa, Staphylococcus aureus
MKERYLIIDGYNMIGQSPTLSAIAKENLEEARMQLIDAIANYNAVISDEIICVFDAYDQSGVEREYMYHGVKTIFTKEKETADSFIERYVYELYDKHTKHITVVTSDMSEQHAIFGSGAYRISSREMWRDLKENEIDVSKSLDDISENKPRTRIPLSSEILAEFEKIRRGHHKK

SEQ ID NO: 12455 - protein, 226 aa, Staphylococcus aureus
MYLRSSIIEEEMILLKRMRDDIKMVFEQDPAARSTLEVITTYAGLHAVWSHLIAHKLYNQKKYVAARAISQISRFFTGIEIHPGAKIGKRLFIDHGMGVVIGETCTIGDNVTIYQGVTLGGTGKERGKRHPDIGDNVLIAAGAKVLGNIKINSNVNIGANSVVLQSVPSYSTVVGIPGHIVKQDGVRVGKTFDHRHLPDPIYEQIKHLERQLEKTRNGEIQDDYII

SEQ ID NO: 12456 - protein, 487 aa, Staphylococcus aureus
MKKMSDRIRVRYAPSPTGYLHIGNARTALFNYLYAKHYNGDFVIRIEDTDKKRNLEDGETSQFDNLKWLGLDWDESVDKDNGYGPYRQSERQHIYQPLIDQLLAEDKAYKCYMTEEELEAEREAQIARGEMPRYGGQHAHLTEEQRQQFEAEGRQPSIRFRVPQNQTYSFDDMVKGNISFDSNGIGDWVIVKKDGIPTYNFAVAIDDYYMEISDVIRGDDHISNTPKQIMIYEAFGWEPPRFGHMSLIVNEERKKLSKRDGQILQFIEQYRDLGYLPEALFNFIALLGWSPEGEEEIFSKEEFIKIFDEKRLSKSPAFFDKQKLAWVNNQYMKQKDTETVFQLALPHLIKANLIPEVPSEEDLSWGRKLIALYQKEMSYAGEIVPLSEMFFKEMPALGEEEQQVINGEQVPELMTHLFSKLEALEPFEAAEIKKTIKEVQKETGIKGKQLFMPIRVAVTGQMHGPELPNTIEVLGKEKVLNRLKQYK

SEQ ID NO: 12457 - protein, 359 aa, Staphylococcus aureus
MMTIKVGIIGCGGIANGKHMPSLQKVENVEMIAFCDVDISKAASAAEAYGTDNAKVYDDYKALLKDDTIDVIHVCTPNDSHCEITVAGLHAGKHVMCEKPMAKTTAEAQKMIDTAKSTGKKLTIGYQNRFRPDSQFLYKSAQRGDLGDIYFGKAHAIRRRAVPTWGVFLDEEAQGGGPLIDIGTHALDLTLWMMDNYEPESVMGSTFHKLNKQHDAANAWGSWNPDEFTVEDSAFGFIKMKNGATIILESAWAINSLEVDEAKCSLSGTKAGADMKDGLRIHGEDMGTLYTKHVELENKGVDFYEGNEVDEAEEEAKAWIDAVVNDTEPVVKPEQAMVVTKILEAIYQSAKSGKAIYFE

SEQ ID NO: 12458 - protein, 346 aa, Staphylococcus aureus
MTKLKVGVIGVGGIAQDRHIPALLKLKDTVSLVAVQDINTVQMIDVAKRFNIPHVVETPSELFKLVDAVVICTPNKFHADLSIEALNHGVHVLCEKPMAMTTEECDRMIEAANKNCKLLTVAYHYRHTDVAMTAKKAIESGVVGKPLVARVQAMRRRKVPGWGVFTNKALQGGGSLIDYGCHLLDLSLWLLGKDMVPHEVLGKTYNQLSKQPNQINDWGTFDHTKFDVDDHVTSYMTFANRASMQFECSWSANIKEDKVHVSLSGEDGGINLFPFEIYEPRFGTIFESKANVEHNEDIAGERQARNFVNACLGIEEIVVKPEEARNVNALIEAIYRSDLDNKSIQL

SEQ ID NO: 12459 - protein, 322 aa, Staphylococcus aureus
MKIGVFSVLFYDKNFEDMLDYVAESGLDMIEVGTGGNPGDKFCKLDELLENEDKRQAFMKSITDRGLQISGFSCHNNPISPDPTEAKEADETLRKTIRLANLLDVPVVNTFSGIAGSDDTAKKPNWPVTPWPTAYSEIYDYQWNEKLIPYWQDLAEFAKEQDVKIAIELHAGFLVHTPYTMLKLREATNEYIGANLDPSHLWWQGIDPIAAIRILGQANAIHHFHAKDTYINQENVNMYGLTDMQPYGNVATRAWTFRTVGYGHSPYVWADIISQLIINGYDYVLSIEHEDPIMSVEEGFQKACQTLKSVNIYDKPADMWWA

SEQ ID NO: 12460 - protein, 690 aa, Staphylococcus aureus
MKKQIISLGALAVASSLFTWDNKADAIVTKDYSKESRVKENSKYDSPISDWYLSSVLNRLGDQIYYAKELTNKYEYGEKEYKKAIDKLMTRVLGEDQYLLEKKKAQYEVYKKWFEKHKSENPNSDLKMTKFHDFDIYRLSMKEYNEIHQSIKEAVDDFNSEVKEIQYKEKDLVPYNEETEKRVTNGIYDFVCEIDTLYAAYFNHNQYGHNAKELRAKLDIILGDVKDPIRITNERIRKEMMDDLNSIIDDFFMDTNMNRPLNISKYNPDIHDYTNKPENRANFDKLVKETREAVDKADDSWKTKTVKNYGESVTKSPVVKEEKKVEEPQAPKVGNQQEVETTVDKAEEATQPVAQPLVKIPQGTITGEIVKGPDYLTMENKTLQGEIVQGPDFPTMEQNRPSLSDNYTQPTTPNPILEGLEGSSSKLEIKPQGTESTLKGIQGEPSNIEVKPQATETTETSQYGPRPQFNKTPKYVKYRDAGTGIREYNDGTFGYEARPRFNKPSETNAYNVTTNQDGTVSYGARPTYKKPSKTNAYNVTTHANGQVSYGARPTQNKPSETNAYNVTTHANGQVSYGARPTQNKPSETNAYNVTTHANGQVSYGARPTYNKPSETNAYNVTTHANGQVSYGARPTYKKPSETNAYNVTTHANGQVSYGARPTYNKPSETNAYNVTTHADGTATYGPRVTK

SEQ ID NO: 12461 - protein, 397 aa, Staphylococcus aureus
MITMQEAYIVAYGRSAAAKAKQGALFHERPDDVAAKVLQGVLKRIDGKFNKNMIEDVIVGTAFPEGLQGQNIARTIALRTGLSDTVPGQTVNRYCSSGLQTIAIAANQIMAGQGDILVAGGVELMSAVPMGGNEPTNNPTLQYDDIGASYPMGLTAENVASQFDVSREDQDAYAVRSHQRAYDAQRDGRFKDEIIPIQVNSVEYTNAGPKVHTNIFDQDEFIRPDTTMEALAKLRTVFKADGTVTAGTSAPLSDGAGFVVLMSGDKVKELGVTPIARFVGYKAVGVDPKIMGIGPAYAIPEVLSLSNLSVEDIDLIELNEAFASQTIASIKEVGLDISRTNVNGGAIALGHPLGATGAMLTARLLNEMGRRPDSRYGMVTMCIGVGMGAAAIFEYVR

SEQ ID NO: 12462 - protein, 753 aa, Staphylococcus aureus
MTINKVTVLGAGTMGAQLAALFVNAGLKVKLLDIVVDKNDPNLIAKKSYDKITDKKRPLLFDLNLASHLTYGNFDDDLVNDDADLYIEAVKEDIEIKHAVWQQVLQHAKEDALFATNTSGIPINAIAQAFNEKDQERFFGLHFFNPPRIMKLVELIPTSHTKESIILDVKNFAQNVLGKGVIVVNDVPGFVANRVGTQTMNDIMYRAEQHKLSIVDVDALTGQAIGRPKTGTYALSDLVGLDIAVSVIKGMQQVPEETTYFHDVKIVNTLFENGALGRKTKQGFYKKNKETKARLVYDVEKQDYVPVSQPQLPILNEFNKDLVHNLDVIFNAQDEAGLFLWETLRNNFYYSAINVPKATDDFRDIDRALVWGFNWKLGPFQLWDAMGYERVKTRMEDELGDLPQWISDLDGGFYKQDETIEYATPVSHFVKDELWDKGDAKLSVTHDDQLLLKLQSKNNVITDEFNDALVDAIDFLENEHYTSMVIYADGNNFSVGANLFLMKKAHEDGLVDDVVAQSIDKLHYSFNRLKYSLKPVVTAVQGRALGGGCELVLYSPIVVAASETYIGLVEAGVGLLPSGGGLAEMADRILRTSHKFDDKQASMTKVLTNIAFAKVSTNAFEARRYGYLRDTDTIIFNTAQRVEVALKRAKYEAETNYIPNPRHQYIALGEDFKALIQGQLDAQRRGHFISDHDYHIALNIATILAGGDLPRNTFINQRYIQSLEKIGFIDLLKSKKSYERIAHMLKTGKPLRN

SEQ ID NO: 12463 - protein, 705 aa, Staphylococcus aureus
MLKGGSNMNGDNQQILREIVLNPTIHGKELESIFGLSRRQLGYRIQKINLWLEQEGYPKLERTSQGNFIVSSEIMTLFKRDVSEQQMLNGNNVIFSIETRRYYLMLMLFSKENAMSLNHFSIDLQVSKNTVIHDINHVKEQLEDHGLSLKYSRKHGYEIVGDEFEVRRFFIKLIDQRLNHDITKSEVLKALNLTFEDIAYQKDKIKQVEQFLKSRFIDKSLSSLPYVLCVIRRRIQNGHVINPLNINYQYLRDTKEYQATEIMTQHEPDLPEAEKLYLTLHLLSTSVQWTDLQESDNISNLTMAIAQMIHHFEQITFINIEDKEKLSQQLLLHLTPAFYRIKYNLTDRDELINPLQGNYQSLFHMVKQSCQSLTEYFGKSLPDNEIAYLTMLFGGSLRRQDENFDGKIKAIIVCTQGTSVSQMMLYELRNLFPEIIFLDAISLRTFENYTLDYDIVFSPMFVLTHKKLFITKVALSENEQRKLRKEVMKYINKESADIDKEINKLMALIERTTTVNDITELRDGLEDFIANYNSISTINGSIVTQNKTLDLADLIPARHVKRIHHVENIDEAIAKASDVLVANHFIDIKYIHEMQQAFDDSYMVIMQNIAIPHAYSEKHVHKTAMSMLILQEPIYMSDGTAIHIIVPIAAVDKVTHLRALLQLRDVAQDNDAIKRIIQSRKNSDVNEILKNYSNKEARENGWDSN

SEQ ID NO: 12464 - protein, 354 aa, Staphylococcus aureus
MFVVKALVKTREGHGNLELLDKEVATPLDDKVKIKVHYAGICGTDIHTYEGHYKVNFPVTLGHEFSGEIVEVGADVKDFKVGDRVTSETTFYVCNECEYCESKDYNLCNHRKGIGTQVDGAFTNYVIAREESLHHIPDEVSYQSAAMTEPLACAHHGVSKIQVNSGDVAVVMGPGPIGLLVAQVLKSKGATVVVTGLDNDKVRLDKAEALHMDYVVNLQQTDLKTYINGITDGYGADVVVECSGAVPAARQGLDILRKKGFYSQIGIFKDAEIPFDMEKVIQKEITVVGSRSQKPADWEPSLQLMADGLVNAEALVTKIYDISKWDEAYQHLKSGEGIKALLKPLDLDENEGEN

SEQ ID NO: 12465 - protein, 44 aa, Staphylococcus aureus
MLTFMLGPLRQITDFYMEHLLVSNSIVIAGYFATGIFKKKKVVN

SEQ ID NO: 12466 - protein, 347 aa, Staphylococcus aureus
MKALKLYGVEDLRYEDNEKPVIESVNDVIVKVRATGICGSDTSRYKKMGPYIKGMPFGHEFSGVVDAIGSDVTHVNVGDKVTGCPAIPCYQCEYCLKGEYARCEKLFVIGSYEPGSFAEYVKLPAQNVLKVPDNVDYIEAAMVEPSAIVAHGFYKSNIQPGMTVAVMGCGSIGLLAIQWARIFGAAHIIAIDIDAHKLDIATSLGAHQTINSKEENLEKFIENHYANQIDLAIESSGAKVTIGQILTLPKKGGEVVLLGIPYDDIEIERVHFEKILRNELTVCGSWNCLSSNFPGKEWTATLHYMKTKDINVKPIISHFLPLEKGPETFDKLVNKKERFDKVMFTIY

SEQ ID NO: 12467 - protein, 242 aa, Staphylococcus aureus
MEDNMIYAGILAGGIGSRMGNVPLPKQFLDIDNKPILIHTIEKFILVSEFNEIIIATPAQWISHTQDILKKYNITDQRVKVVAGGTDRNETIMNIIDHIRNTQGINDDDVIVTHDAVRPFLTQRIIKENIEVAAKYGAVDTVIEAIDTIVMSKDKQNIHSIPVRNEMYQGQTPQSFNIKLLQDSYRALSSAQKEILSDACKIIVESGHAVKLVRGELYNIKVTTPYDLKVANAIIQGDIADD

SEQ ID NO: 12468 - protein, 350 aa, Staphylococcus aureus; identical to SEQ ID NO: 5749

SEQ ID NO: 12469 - protein, 564 aa, Staphylococcus aureus
MTKTKQAIHIDNIYWERVQLYIEGHSEGVDLTSGQFVLRNLTETKTLEANEMKIDGNKFICRFNVAILDDGYYLPMDKYLFVYHDQLEYIGQLNPNIIDQAYAALNEEQIEEYNELTTQNGKSNYVLANEAKVFRKGGVSQHTVYTITPEIASDVNEFVFDIEITLPQEKSGVIATSAHWLHKQGHKASFESRSFLFKAIFNITKLLHIKRSKTILFTSDSRPNLSGNFKYVYDELLRQKVDFDYDIQTVFKANITDRRKWRDKFRLPYLLGKADYIFVDDFHPLIYTVRFRPSQEIIQVWHAVGAFKTVGFSRTGKKSGPFIDSLNHRSYTKAYVSSETDIPFYAEAFGIREENVVPTGVPRTDVLFDEAYATQIKQEMEDELPIIKGKKVILFAPTFRGNGHGTAHYPFFKIDFERLARYCEKNNAVVLFKMHPFVKNRLNISREHRQYFIDVSDYREVNDILFVTDLLISDYSSLIYEYAVFKKPMIFYAFDLEDYITTRDFYEPYESFVPGKIVQSFDALMDALDNEDYEVEKVVPFLDKHFKYQDGRSSERLVKDLFRR

SEQ ID NO: 12470 - protein, 410 aa, Staphylococcus aureus
MVTMSLLIHINIITKTRRRYDMIKTTIKKLIEHSIYTTFKLLSKLPNKNLIYFESFHGKQYSDNPKALYEYLTEHSDAQLIWGVKKGYEHIFQQHNVPYVTKFSMKWFLAMPRAKAWMINTRTPDWLYKSPRTTYLQTWHGTPLKKIGLDISNVKMLGTNTQNYQDGFKKESQRWDYLVSPNPYSTSIFQHAFHVSRDKILETGYPRNDKLSHKRNDTEYINGIKTRLNIPLDKKVIMYAPTWRDDEAIREGSYQFNVNFDIEALRQALDDDYVILLRMHYLVVTRIDEHDDFVKDVSDYEDISDLYLISDALVTDYSSVMFDFGVLKRPQIFYAYDLDKYGDELRGFYMDYKKELPGPIVENQTALIDALKQIDETANEYIEARTVFYQKFCSLEDGHASQRICQTIFK

SEQ ID NO: 12471 - protein, 238 aa, Staphylococcus aureus
MKYAGILAGGIGSRMGNVPLPKQFLDLDNKPILIHTLEKFILINDFEKIIIATPQQWMTHTKDTLRKFKISDERIEVIQGGRDRNDTIMNIVKHIESTNGINDDDVIVTHDAVRPFLTHRIIKENIQAALEYGAVDTVIDAIDTIVTSKDNQTIDAIPVRNEMYQGQTPQSFNINLLKESYAQLSDEQKSVLSDACKIIVETNKPVRLVKGELYNIKVTTPYDLKVANAIIRGGIADD

SEQ ID NO: 12472 - protein, 350 aa, Staphylococcus aureus; identical to SEQ ID NO: 5712

SEQ ID NO: 12473 - protein, 518 aa, Staphylococcus aureus
MKANDVKIDGNQFVCRFNVAILDNGYYLPEDKYLLVNEQELDYIAQLNPDVINDAYQNLKPEQEEEYNELETQNGKINFLLQTYLKEFRKGGISKKTVYTVTPEISSDVNEFVLDVVVTTPEVKSIYIVRKYKELRKYFRKQSFNTRQFIFKAIFNTTKFFHLKKGNTVLFTSDSRPTMSGNFEYIYNEMLRQNLDKKYDIHTVFKANITDRRGIIDKFRLPYLLGKADYIFVDDFHPLIYTVRFRRSQEVIQVWHAVGAFKTVGFSRTGKKGGPFIDSLNHRSYTKAYVSSETDIPFYAEAFGIKEKNVVPTGVPRTDVLFDEAYATQIKQEMEDELPIIKGKKVILFAPTFRGSGHGTAHYPFFKIDFERLARYCEKNNAVVLFKMHPFVKNRLNIADKHKQYFVDVSDFREVNDILFITDLLISDYSSLIYEYAVFKKPMIFYAFDLEDYITTRDFYEPYESFVPGKIVQSFDALMDALDNEDYEGEKVIPFLDKHFKYQDGRSSERLVRNLFGS

SEQ ID NO: 12474 - protein, 573 aa, Staphylococcus aureus
MMKFSVIVPTYNSEKYITELLNSLAKQDFPKTEFEVVVVDDCSTDQTLQIVEKYRNKLNLKVSQLETNSGGPGKPRNVALKQAEGEFVLFVDSDDYINKETLKDAAAFIDEHHSDVLLIKMKGVNGRGVPQSMFKETAPEVTLLNSRIIYTLSPTKIYRTALLKDNDIYFPEELKSAEDQLFTMKAYLNANRISVLSDKAYYYATKREGEHMSSAYVSPEDFYEVMRLIAVEILNADLEEAHKDQILAEFLNRHFSFSRTNGFSLKVKLEEQPQWINALGDFIQAVPERVDALVMSKLRPLLHYARAKDIDNYRTVEESYRQGQYYRFDIVDGKLNIQFNEGEPYFEGIDIAKPKVKMTAFKFDNHKIVTELTLNEFMIGEGHYDVRLKLHSRNKKHTMYVPLSVNANKQYRFNIMLEDIKAYLPKEKIWDVFLEVQIGTEVFEVRVGNQRNKYAYTAETSALIHLNNDFYRLTPYFTKDFNNISLYFTAITLTDSFSMKLKGKNKIILTGLDRGYVFEEGMASVVLKDDMIMGMLSQTSENEVEILLSKDIKKRDFKNIVKLNTAHMTYSLK

SEQ ID NO: 12475 - protein, 230 aa, Staphylococcus aureus
MRRSSIMINKNDIVADVVTDYPKAADIFRSVGIDFCCGGQVSIEAASLEKKNVDLNELLQRLNDIEQTNTPGSLNPKFLNVSSLIQYIQAAYHEPLREEFKNLTPYVMKLSKVHGPNHPYLVELKETYDTFKNGMLEHMQKEDDVDFPKLIKYEQGEVVDDINTVIDDLVSDHIATGQLLVKMSDLTSSYEPPIEACGTWRLVYQRLKALEVLTHEHVHLENHVLFKKVS

SEQ ID NO: 12476 - protein, 584 aa, Staphylococcus aureus
MLSLTMLLLERVGLIIILAYVLMNIPYFKNLMNRRRTWKARWQLCIIFSLFALMSNLTGIVIDHQHSLSGSVYFRLDDDVSLANTRVLTIGVAGLVGGPFVGLFVGVISGIFRVYMGGADAQVYLISSIFIGIIAGYFGLQAQRRKRYPSIAKSAVIGIVMEMIQMLSILTFSHDKAYAVDLISLIALPMIIVNSVGTAIFMSIIISTLKQEEQMKAVQTHDVLQLMNQTLPYFKEGLNRESAQQIAMIIKNLMKVSAVAITSKNEILSHVGAGSDHHIPTNEILTSLSKDVLKSGKLKEVHTKEEIGCSHPNCPLRAAIVIPLEMHGSIVGTLKMYFTNPNDLTFVERQLAEGLANIFSSQIELGEAETQSKLLKDAEIKSLQAQVSPHFFFNSINTISALVRINSEKARELLLELSYFFRANLQGSKQHTITLDKELSQVRAYLSLEQARYPGRFNININVEDKYRDVLVPPFLIQILVENAIKHAFTNRKQGNDIDVSVIKETATHVRIIVQDNGQGISKDKMHLLGETSVESESGTGSALENLNLRLKGLFGKSAALQFESTSSGTTFWCVLPYERQEEE

SEQ ID NO: 12477 - protein, 246 aa, Staphylococcus aureus; identical to SEQ ID NO: 5717

SEQ ID NO: 12478 - protein, 591 aa, Staphylococcus aureus
MKKIISIAIIVLALVLSGCGVPTKSEVAQKSSKVEVKGERPTIHFLGQASYENDMNIVKDQLENAGFNVKMNIQPDYGSYRTQRQAGNYDIQIDDWMTVFGDPNYAMTALFSSTGSNSLLKDKHVDQLLNKASTQNEADVKQTYKQIEDEVVFDKGYMAPLYGSKKNLVYDNKVLDKNSVGLPNSRALIWQQFDYNNSRERDTRPLVMTQQDGEIPTLDPIRSIAPSVYSINMNMYTRLLLLDENDHLTTKGSLSRDYAVNKDNKAFYFLLRDDDYFAKVVNGQARNTGERVSAEDVKFSLDRARDKKSVPNNNTYNMHKHINDIKILKDEDIDQLRKEKDKDDKSIYDKLIKAYNVKSLTTDGQRVNNKDGIYQIVKITTDQSMPREVNYLTHSSAGILSKKFVNQVNQEYPKGYGDSSTIPANSDGKNALYASGAYIMTQKNAYQATFQRNPGFNETEKGSYGPAKIKNITLKFNGDPNNALSELRNHSIDMLADVNQKHFDLIKSDKNLSIIRKNGRKSVFLMLNIKKGIFKTHPNLRQAVVNAIDQDQFIKFYRGDKFKIASPITPLVDTGNEQRQDLEKVEKAINQ

SEQ ID NO: 12479 - protein, 280 aa, Staphylococcus aureus
MISHIFPFYYQVEGVILMGNKYKDYAQDILTAVGGVENIVNVSYDTVRMTIHMHHAIPSTANEVTQIDGVASVDENETQLVIVFNEEVKYVYQQLQLLMDDAKHQEDTNHDAVDTQETEQKAQVKVTTPILVKAPIAGRRILLKEVRDSIFREKMVGEGLAIKAHEESKVIAPFNGLVSMIVPTKHAVGIQSEDGVDIVIHIGVNTVDLEGKGFKCFVKQNDRVEAGQTLLQFDQQYIQEQGYNSDVIVVISNSADLGKVELTMNEIITTEDVIFKIFKN

SEQ ID NO: 12480 - protein, 478 aa, Staphylococcus aureus; identical to SEQ ID NO: 5719

SEQ ID NO: 12481 - protein, 333 aa, Staphylococcus aureus
MRTMCTGFTIQTLNNQVLLGRTMDYDYPLDGSPAVTPRNYRWTSRTGTTGQTQYGFIGTGTDMEGFIYGDGVNEHGVAISTQYFRGYSSYGSTHKADAMNITQNEIVTWILGYTTSIEDMKQQASQIHVVAVYLNDIGEVPPLHYHVSDATGHSVEVSFKEGEVIIKDNPIGVLTNHPDLDWHYSNLRQYINISPYPATANLLEGETIEPLGNEAGTFGLPGGFTSTERFVRMAFMKANIAQNNDKEMDLMNAFYLLDAVNIPIGIVRPHDADNHYTMYQTVINLTTRTLYIKYYGSNEIVALKLTDDLINRKDMTIFKPEKHITIKKLNDNQ

SEQ ID NO: 12482 - protein, 305 aa, Staphylococcus aureus
MGFATFTMAHQAYAADTTNTQQAHTQMSTQSQDVSYGTYYTIDSNGDYHHTPDGNWNQAMFDNKEYSYTFVDAQGHTHYFYNCYPKNANANGSGQTYVNPATAGDNNDYTASQSQQHINQYGYQSNVGPDASYYSHSNNNQAYNSHNGNGKVNYPNGTSNQNGGSASKATASGHAKDASWLTSRKQLQPYGQYHGGGAHYGVDYAMPENSPVYSLTDGTVVQAGWSNYGGGNQVTIKEANSNNYQWYMHNNRLTVSAGDKVKAGDQIAYSGSTGNSTAPHVHFQRMSGGIGNQYAVDPTSYLQSR

SEQ ID NO: 12483 - protein, 444 aa, Staphylococcus aureus
MVKNHNPKNEMQDMLTPLDAEEAAKTKLRLDMREIPKSSIKPEHFHLMYLLEQHSPYFIDAELTELRDSFQIHYDINDNHTPFDNIKSFTKNEKLRYLLNIKNLEEVNRTRYTFVLAPDELFFTRDGLPIAKTRGLQNVVDPLPVSEAEFLTRYKALVICAFNEKQSFDALVEGNLELHKGTPFETKVIEAATLDLLTAFLDEQYQKQEQDYSQNYAYVRKVGHTVFKWVSIGMTTLSVLLIAFLAFLYFSVMKHNERIEKGYQAFVKDDYTQVLNTYDDLDGKKLDKEALYIYAKSYIQTNKQGLEKDKKENLLNNVTPNSNKDYLLYWMELGQGHLDEAINIATYLDDNDITKLALINKLNEIKNNGDLSNDKRSEETKKYNDKLQDILDKEKQVKDEKAKSEEEKAKAKDEKLKQQEENEKKQKEQAQKDKEKRQEAERKK

SEQ ID NO: 12484 - protein, 1482 aa, Staphylococcus aureus
MHKLIIKYNKQLKMLNLRDGKTYTISEDERADITLKSLGEVIHLEQNNQGTWQANHTSINKVLVRKGDLDDITLQLYTEADYASFAYPSIQDTMTIGSNAYDDMVIQSLMNAIIIKDFQSIQETQYVRIVHDKNTDVYINYELQEQLTNKAYIGDHIYVEGIWLEVQADGLNVLSQNTVASSLIRLTQEMPHAQADDYNTYHRSPRIIHREPTDDIKIERPPQPIQKNNTVIWRSIIPPLVMIALTVVIFLVRPIGIYILMMIGMSTVTIVFGITTYFSEKKKYNKDVEKREKDYKAYLDNKSKEINKAIKAQRFSLNYHYPTVAEIKDIVETKAPRIYEKTSHHHDFLHYKLGIANVEKSFELDYQEEEFNQRRDELFDDAKELYEFYTDVEQAPLINDLNHGPIAYIGARHLILEELEKMLIQLSTFHSYHDLEFLFVTREDEVETLKWARWLPHMTLRGQNIRGFVYNQRTRDQILTSIYSMIKERIQAVRERSRSNEQIIFTPQLVFVITDMSLIIDHVILEYVNQDLSEYGISLIFVEDVIESLPEHVDTIIDIKSRTEGELITKEKELVQLKFTPENIDNVDKEYIARRLANLIHVEHLKNAIPDSITFLEMYNVKEVDQLDVVNRWRQNETYKTMAVPLGVRGKDDILSLNLHEKAHGPHGLVAGTTGSGKSEIIQSYILSLAINFHPHEVAFLLIDYKGGGMANLFKDLVHLVGTITNLDGDEAMRALTSIKAELRKRQRLFGEHDVNHINQYHKLFKEGVATEPMPHLFIISDEFAELKSEQPDFMKELVSTARIGRSLGIHLILATQKPSGVVDDQIWSNSKFKLALKVQDRQDSNEILKTPDAADITLPGRAYLQVGNNEIYELFQSAWSGATYDIEGDKLEVEDKTIYMINDYGQLQAINKDLSGLEDEETKENQTELEAVIDHIESITTRLEIEEVKRPWLPPLPENVYQEDLVETDFRKLWSDDAKEVELTLGLKDVPEEQYQGPMVLQLKKAGHIALIGSPGYGRTTFLHNIIFDVARHHRPDQAHMYLFDFGTNGLMPVTDIPHVADYFTVDQEDKIAKAIRKIHDIISERKRLLSQERVVNIEQYNKETGNSIPNVFLIIDNYDTVKESPFMEEYEEMMSKVTREGLALGVYIVLSGSRSSAIKSAIFTNIKTRVALYLFENNELTNIIGSYKKGVKDVKGRAAINDDNFTQFQIAQPFELADGQTYNERIKNEVAQMKEFYVGDYPKHIPMMPDKVLMEDIQETYDLEKIIHEEHKLPLGLDFEDVELVSLDLTSSSIVTAIKPTEMEKMNDVIMSSLSVYSKNQFVILVDAEDNMSQYAEDVTSYYSAPSDLSNIRLGFKQEIEARKNGEKSIEECKIVFINNIKRFNQLTGMTEAELRVLFHDGQKVHIIIIASGLYSDTIGAFDRESKMMVRTINQALISHKISEQEFIRVKDRFGEPELKVGEMYYINNQEYQKIKLMEG

SEQ ID NO: 12485 - protein, 309 aa, Staphylococcus aureus; identical to SEQ ID NO: 5359

SEQ ID NO: 12486 - protein, 504 aa, Staphylococcus aureus
MIKCKKIFRSIGEIQVYQLEDDSLMLHNDLYQINMAESYWNDNIHEKMAVFDLYFRKMPFNSGYAVFNGLKRVIDFIEHFGFSESDLEYLKSIGYKDDFLSYLKDLKFTGSIRSMQEGELCFGNEPLLRVEAPLIQAQLIETILLNIVNFHTLITTKASRIRQIASNDKLMEFGTRRAQEIDAALWGARAAYIGGFDSTSNVRAGKLFGIPVSGTHAHAFVQTYGDEYVAFKKYAERHKNCVFLVDTFHTLKSGVPNAIKVAKELGDKINFVGIRLDSGDIAYLSKEARRMLDEAGFTETKIIASNDLDEETITSLKAQGAKVDSWGVGTKLITGYDQPALGAVYKLVAIENEDGSYSDRIKLSNNAEKVTTPGKKNVYRIINKKTGKAEGDYITLENENPYDEQPLKLFHPVHTYKMKFIKSFEAIDLHHNIYENGKLVYQMPTEDESREYLAQGLQSIWDENKRFLNPQEYPVDLSKACWDNKHKRIFEVAEHVKEMEEDNE

SEQ ID NO: 12487 - protein, 273 aa, Staphylococcus aureus
MSKLQDVIVQEMKVKKRIDSAEEIMELKQFIKNYVQSHSFIKSLVLGISGGQDSTLVGKLVQMSVNELREEGIDCTFIAVKLPYGVQKDADEVEQALRFIEPDEIVTVNIKPAVDQSVQSLKEAGIVLTDFQKGNEKARERMKVQFSIASNRQGIVVGTDHSAENITGFYTKYGDGAADIAPIFGLNKRQGRQLLAYLGAPKELYEKTPTADLEDDKPQLPDEDALGVTYEAIDNYLEGKPVTPEEQKVIENHYIRNAHKRELAYTRYTWPKS

SEQ ID NO: 12488 - protein, 431 aa, Staphylococcus aureus; identical to SEQ ID NO: 5406

SEQ ID NO: 12489 - protein, 730 aa, Staphylococcus aureus
MNALLNHMNTEQSEAVKTTEGPLLIMAGAGSGKTRVLTHRIAYLLDEKDVSPYNVLAITFTNKAAREMKERVQKLVGDQAEVIWMSTFHSMCVRILRRDADRIGIERNFTIIDPTDQKSVIKDVLKNENIDSKKFEPRMFIGAISNLKNELKTPADAQKEATDYHSQMVATVYSGYQRQLSRNEALDFDDLIMTTINLFERVPEVLEYYQNKFQYIHVDEYQDTNKAQYTLVKLLASKFKNLCVVGDSDQSIYGWRGADIQNILSFEKDYPEANTIFLEQNYRSTKTILNAANEVIKNNSERKPKGLWTANTNGEKIHYYEAMTERDEAEFVIREIMKHQRNGKKYQDMAILYRTNAQSRVLEETFMKSNMPYTMVGGQKFYDRKEIKDLLSYLRIIANSNDDISLQRIINVPKRGVGPSSVEKVQNYALQNNISMFDALGEADFIGLSKKVTQECLNFYELIQSLIKEQEFLEIHEIVDEVLQKSGYREMLERENTLESRSRLENIDEFMSVPKDYEENTPLEEQSLINFLTDLSLVADIDEADTENGVTLMTMHSAKGLEFPIVFIMGMEESLFPHIRAIKSEDDHEMQEERRICYVAITRAEEVLYITHATSRMLFGRPQSNMPSRFLKEIPESLLENHSSGKRQTIQPKAKPFAKRGFSQRTTSTKKQVSSSDWNVGDKVMHKAWGEGMVSNVNEKNGSIELDIIFKSQGPKRLLAQFAPIEKKED

SEQ ID NO: 12490 - protein, 667 aa, Staphylococcus aureus
MADLSSRVNELHDLLNQYSYEYYVEDNPSVPDSEYDKLLHELIKIEEEHPEYKTVDSPTVRVGGEAQASFNKVNHDTPMLSLGNAFNEDDLRKFDQRIREQIGNVEYMCELKIDGLAVSLKYVDGYFVQGLTRGDGTTGEDITENLKTIHAIPLKMKEPLNVEVRGEAYMPRRSFLRLNEEKEKNDEQLFANPRNAAAGSLRQLDSKLTAKRKLSVFIYSVNDFTDFNARSQSEALDELDKLGFTTNKNRARVNNIDGVLEYIEKWTSQRESLPYDIDGIVIKVNDLDQQDEMGFTQKSPRWAIAYKFPAEEVVTKLLDIELSIGRTGVVTPTAILEPVKVAGTTVSRASLHNEDLIHDRDIRIGDSVVVKKAGDIIPEVVLSIPERRPEDAFTYHMPTHCPSCGHELVRIEGEVALRCINPKCQAQLVEGLIHFVSRQAMNIDGLGTKIIQQLYQSELIKDVADIFYLTEEDLLPLDRMGQKKVDNLLAAIQQAKDNSLENLLFGLGIRHLGVKASQVLAEKYETIDRLLTVTEAELVEIHDIGDKVAQSVVTYLENEDIRALIQKLKDKHVNMIYKGIKTSDIEGHPEFSGKTIVLTGKLHQMTRNEASKWLASQGAKVTSSVTKNTDVVIAGEDAGSKLTKAQSLGIEIWTEQQFVDKQNELNS

SEQ ID NO: 12491 - protein, 100 aa, Staphylococcus aureus
MTKVTREEVEHIANLARLQISPEETEEMANTLESILDFAKQNDSADTEGVEPTYHVLDLQNVLREDKAIKGIPQELALKNAKETEDGQFKVPTIMNEEDA

SEQ ID NO: 12492 - protein, 491 aa, Staphylococcus aureus
MRRTRKMSIRYESVENLLTLIKDKKIKPSDVVKDIYDAIEETDPTIKSFLALDKENAIKKAQELDELQAKDQMDGKLFGIPMGIKDNIITNGLETTCASKMLEGFVPIYESTVMEKLHNENAVLIGKLNMDEFAMGGSTETSYFKKTVNPFDHKAVPGGSSGGSAAAVAAGLVPFSLGSDTGGSIRQPAAYCGVVGMKPTYGRVSRFGLVAFASSLDQIGPLTRNVKDNAIVLEAISGADVNDSTSAPVDDVDFTSEIGKDIKGLKVALPKEYLGEGVADDVKEAVQNAVETLKSLGAVVEEVSLPNTKFGIPSYYVIASSEASSNLSRFDGIRYGYHSKEAHSLEELYKMSRSEGFGKEVKRRIFLGTFALSSGYYDAYYKKSQKVRTLIKNDFDKVFENYDVVVGPTAPTTAFNLGEEIDDPLTMYANDLLTTPVNLAGLPGISVPCGQSNGRPIGLQFIGKPFDEKTLYRVAYQYETQYNLHDVYEKL

SEQ ID NO: 12493 - protein, 478 aa, Staphylococcus aureus
MEIMHFETVIGLEVHVELKTDSKMFSPSPAHFGAEPNSNTNVIDLAYPGVLPVVNKRAVDWAMRAAMALNMEIATESKFDRKNYFYPDNPKAYQISQFDQPIGENGYIDIEVDGETKRIGITRLHMEEDAGKSTHKGEYSLVDLNRQGTPLIEIVSEPDIRSPKEAYAYLEKLRSIIQYTGVSDVKMEEGSLRCDANISLRPYGQEKFGTKAELKNLNSFNYVRKGLEYEEKRQEEELLNGGEIGQETRRFDESTGKTILMRVKEGSDDYRYFPEPDIVPLYIDDAWKERVRQTIPELPDERKAKYVNELGLPAYDAHVLTLTKEMSDFFESTIEHGADVKLTSNWLMGGVNEYLNKNQVELLDTKLTPENLAGMIKLIEDGTMSSKIAKKVFPELAAKGGNAKQIMEDNGLVQISDEATLLKFVNEALDNNEQSVEDYKNGKGKAMGFLVGQIMKASKGQANPQLVNQLLKQELDKR

SEQ ID NO: 12494 - protein, 315 aa, Staphylococcus aureus
MRKRARIIYNPTSGKEQFKRELPDALIKLEKAGYETSAYATEKIGDATLEAERAMHENYDVLIAAGGDGTLNEVVNGIAEKPNRPKLGVIPMGTVNDFGRALHIPNDIMGALDVIIEGHSTKVDIGKMNNRYFINLAAGGQLTQVSYETPSKLKSIVGPFAYYIKGFEMLPQMKAVDLRIEYDGNVFQGEALLFFLGLTNSMAGFEKLVPDAKLDDGYFTLIIVEKSNLAELGHIMTLASRGEHTKHPKVIYEKAKAINISSFTDLQLNVDGEYGGKLPANFLNLERHIDVFAPNDIVNEELINNDHVDDNLIEE

SEQ ID NO: 12495 - protein, 328 aa, Staphylococcus aureus
MVHHYFTNLIILGVIERGLIMTSSTNVKALIEKNNNKKGKHNDKIIPVILAAISAISILTTLGILITLLLETITFFTRIPITEFLFSTTWNPTGSDPKFGIWALIIGTLKITVIATIFAVPVGLGAAIYLSEYASDRARRIIKPILEILAGIPTIVFGFFALTFVTPVLRSFIPGLGEFNAISPGLVVGIMIVPLITSLSEDAMASVPNKIREGAYGLGATKLEVATKVVLPAATSGIVASIVLAISRAIGETMIVSLAAGSSPTASLSLTSSIQTMTGYIVEIATGDATFGSNIYYSIYAVGFTLFIFTLIMNLLSQWISKRFREEF

SEQ ID NO: 12496 - protein, 274 aa, Staphylococcus aureus
MRQWTAIHLAKLARKASRAVGKRGTDLPGQIARKVDTDILRKLAEQVDDIVFISGTNGKTTTSNLIGHTLKANNIQIIHNNEGANMAAGITSAFIMQSTPKTKIAVIEIDEGSIPRVLKEVTPSMMVFTNFFRDQMDRFGEIDIMVNNIAETISNKGIKLLLNADDPFVSRLKIASDTIVYYGMKAHAHEFEQSTMNESRYCPNCGRLLQYDYIHYNQIGHYHCQCGFKREQAKYEISSFDVAPFLHLNINDEKYDMKIAGDFNAYNALQHIQF

SEQ ID NO: 12497 - protein, 139 aa, Staphylococcus aureus
MQYFKKERKEAMINLAKNPAGMNASLSVGEQLEGEKVYVISLNDNAADGRDTSWIYDADFEKLSKQQIEAIIVTGTRAEELQLRLKLAEVEVPIIVERDIYKATAKTMDYKGFTSAIPNYTSLAPMLEQLNRSFEGGQS

SEQ ID NO: 12498 - protein, 347 aa, Staphylococcus aureus
MNHYIRTIGSMLILVYSMLAAFLFIDKVFVNIIYFQGMFYTQIFGIPVFLFLNLIIILLCIIVGSVLAYKINQQNDWIKTQIERSMEGETVGINDQNIEIYSETLDLYHTLVPLNQELHKLRLKTQNLTNENYNINDVKVKKIIEDERQRLARELHDSVSQQLFAASMMLSAIKETKLEPPLDQQIPILEKMVQDSQLEMRALLLHLRPLGLKDKSLGEGIKDLVIDLQKKVPMKVVHEIQDFKVPKGIEDHLFRITQEAISNTLRHSNGTKVTVELFNKDDYLLLRIQDNGKGFNVDEKLEQSYGLKNMRERALEIGATFHIVSLPDSGTRIEVKAPLNKEDSYDD

SEQ ID NO: 12499 - protein, 71 aa, Staphylococcus aureus
MNIVAMTNEEKVLAIREKLNIVNQGLLDPEKYTNANEEELTDIYDFVQSRERLSPSEVTAIADALGQLRHD

SEQ ID NO: 12500 - protein, 418 aa, Staphylococcus aureus
MGILTNYKEKLQQYAELLVKVGMNVQPKQPVFIRSSVETLELTHLIVEEAYHCGASDVRVVYSDPTLKRLKFENESVEHFANHEIKSYDVEARMDYVKRGAANLALISEDPDLMDGIDSQKLQAFQQQNARAFKGYMESVQKNQFPWVVAAFPSKAWAKRVYPELSVEEAYIKFIDEVFDIVRIDGNDPVENWRQHIANLSVYAQKLQQKNYHALHYVSEGTDLTVGLAKNHIWEDATSYVNGKEQAFIANIPTEEVFTAPDRNRVDGYVTNKLPLSYNGTIIDQFKLMFKDGEIIDFSAEKGEAVLKDLINTDEGSRRLGEVALVPDDSPISNRNTIFYNTLFDENAACHLAIGSAYAFNIQGGTEMTVEEKIASGLNDSNVHVDFMIGSSDLTIYGIFEDGSKELVFENGNWASTF

SEQ ID NO: 12501 - protein, 578 aa, Staphylococcus aureus
MIKRYLQFVKPYKYRIFATIIVGIIKFGIPMLIPLLIKYAIDGVINNHALTTDEKVHHLTIAIGIALFIFVIVRPPIEFIRQYLAQWTSNKILYDIRKKLYNHLQALSARFYANNQVGQVISRVINDVEQTKDFILTGLMNIWLDCITIIIALSIMFFLDVKLTLAALFIFPFYILTVYVFFGRLRKLTRERSQALAEVQGFLHERVQGISVVKSFAIEDNEAKNFDKKNTNFLTRALKHTRWNAYSFAAINTVTDIGPIIVIGVGAYLAISGSITVGTLAAFVGYLELLFGPLRRLVASFTTLTQSFASMDRVFQLIDEDYDIKNGVGAQPIEIKQGRIDIDHVSFQYNDNEAPILKDINLSIEKGETVAFVGMSGGGKSTLINLIPRFYDVTSGQILIDGHNIKDFLTGSLRNQIGLVQQDNILFSDTVKENILLGRPTATDEEVVEAAKMANAHDFIMNLPQGYDTEVGERGVKLSGGQKQRLSIARIFLNNPPILILDEATSALDLESESIIQEALDVLSKDRTTLIVAHRLSTITHADKIVVIENGHIVETGTHRELIAKQGAYEHLYSIQNL

SEQ ID NO: 12502 - protein, 429 aa, Staphylococcus aureus
MNFSESERLQQLSNEYILGGVNSPSRSYKAVGGGAPVVMKEGHGAYLYDVDGNKFIDYLQAYGPIITGHAHPHITKAIQEQAAKGVLFGTPTELEIEFSKKLRDAIPSLEKIRFVNSGTEAVMTTIRVARAYTKRNKIIKFAGSYHGHSDLVLVAAGSGPSQLGSPDSAGVPESVAREVITVPFNDINAYKEAIEFWGDEIAAVLVEPIVGNFGMVMPQPGFLEEVNEISHNNGTLVIYDEVITAFRFHYGAAQDLLGVIPDLTAFGKIVGGGLPIGGYGGRQDIMEQVAPLGPAYQAGTMAGNPLSMKAGIALLEVLEQDGVYEKLDSLGQQLEEGLLKLIEKHNITATINRIYGSLTLYFTDEKVTHYDQVEHSDGEAFGKFFKLMLNQGINLAPSKFEAWFLTTEHTEEDIKQTLKAADYAFSKMK

SEQ ID NO: 12503 - protein, 504 aa, Staphylococcus aureus
MLFPCIFGKNLCLGGNKIMKKKMITLGTVAIATSLFTWDNKADAIVNDNYTGQSQVKEDSKNSNKISNDSLYWGVFGNLEAQFKNALNLLKEYQYSEEEYKEAKDKLMTRIVSENQYLLDKKFKEYEAYKAAFPNFKAQNPTLKRLSFDNYDIRDLRQGEYNDIRASLKNAVETFHKDVSAVQSKQTDLKTFDQQEMDQAKLKINELENKALMLGFAFSKQTDARQDLYNKLDMILGYSEKERTEKQPKNKRMFEETVKDLETIMDEFFTDIGKQRPSEIPTLTDNNENNKALAKSLRDLTNSITSNSSQKKTVDKVVKKPDTQSTGNKEFVIKEPTKPSIPTYTEEITKKPMPSIKQEIKEKIIYSSPQRFAGLSGERDDSSTSYNSLQTRITTNSNLVEFEEDTSARSQYGPRPQFNKTPKYIKYKDASTGIHEYNDGTFGYEARPKFNKPASTNKYNVTTKQDGTVSYGARPTFNKSSYTNAYNVTTHANGTTTYGPRVTK

SEQ ID NO: 12504 - protein, 239 aa, Staphylococcus aureus
MVQHLTAEEIIQYISDAKKSTPIKVYLNGNFEGITYPESFKVFGSEQSKVIFCEADDWKPFYEAYGSQFEDIEIEMDRRNSAIPLKDLTNTNARIEPGAFIREQAIIEDSAVVMMGATINIGAVVGEGTMIDMNATLGGRATTGKNVHVGAGAVLAGVIEPPSASPVIIEDDVLIGANAVILEGVRVGKGAIVAAGAIVTQDVPAGAVVAGTPAKVIKQASEVQDTKKEIVAALRKLND

SEQ ID NO: 12505 - protein, 240 aa, Staphylococcus aureus
MKILLIGYGAMNQRVARLAEEKGHEIVGVIENTPKATTPYQQYQHIADVKDADVAIDFSNPNLLFPLLDEEFHLPLVVATTGEKEKLLNKLDELSQNMPVFFSANMSYGVHALTKILAAAVPLLDDFDIELTEAHHNKKVDAPSGTLEKLYDVIVSLKENVTPVYDRHELNEKRQPQDIGIHSIRGGTIVGEHEVLFAGTDETIQITHRAQSKDIFANGAIQAAERLVNKPNGFYTFDNL

SEQ ID NO: 12506 - protein, 329 aa, Staphylococcus aureus
MTKLAVVGATGLVGTKMLETLNRKNIPFDELVLFSSARSAGQEVEFQGKTYTVQELTDARASEHFDYVLMSAGGGTSEHFAPLFEKAGAIVIDNSSQWRMAEDIDLIVPEVNEPTFTRGIIANPNCSTIQSVVPLKVLQDAYGLKRVAYTTYQAVSGSGMKGKKDLAEGINGKTPEAYPHPIYNNVLPHIDVFLENGYTKEEQKMIDETRKILNVPDLKVTATCARVPVQDSHSVEIDVTLEKEATAEDIKALFDQDDRVVLVDNPENNEYPMAINSTNKDEVFVGRIRRDDSLENTFHVWCTSDNLLKGAALNAVQVLEQVMRLKGAN

SEQ ID NO: 12507 - protein, 151 aa, Staphylococcus aureus
MRYVYLQNCVYCVYCIYTEGDRGTLMKIILKNNSDFPIYEQIKQQVKQNILKGHVAPGEHLPSMRELAKDLQVSLITTKRAYEDLEKDGFVTTIRGKGTFVKEKDSSILKEKQFFTIENLVKELVNEAQAIEMSLEELQDILTFIYEEESS

SEQ ID NO: 12508 - protein, 126 aa, Staphylococcus aureus
MNAIELSNVSYSSDQFNLKNISFKVPQGFVTGFIGRNGAGKTTIIRLIMDLYQPQTGVIRVLEEDMALNPIELKNRIGFVYAENYFNERWTTKQLEKMIAPFYRTWDHQVFEFYLAKFELPINQSI

SEQ ID NO: 12509 - protein, 166 aa, Staphylococcus aureus
MKMKLSLAVAFSHHAELYIFDEPTSGLDPLARNELLEIIQQELIDENKTIFMSTHIISDLEKIADYIIHLSDGEVILNGSKEQLLQRYQVVSGAIEDLDDELASLLIFEEHKRTGFIGLTEHAQVFKEILGHKVNITTPSIENLMVYLEKRKSKYHENIKLMEEGF

SEQ ID NO: 12510 - protein, 540 aa, Staphylococcus aureus
MKKRRKCMLQVTDVSLRFGDRKLFEDVNIKFTEGNCYGLIGANGAGKSTFLKILSGELDSQTGHVSLGKNERLAVLKQDHYAYEDERVLDVVIKGHERLYEVMKEKDEIYMKPDFSDEDGIRAAELEGEFAEMNGWNAEADAANLLSGLGIDPTLHDKKMAELENNQKIKVLLAQSLFGEPDVLLLDEPTNGLDIPAISWLEDFLINFDNTVIVVSHDRHFLNNVCTHIADLDFGKIKVYVGNYDFWYQSSQLAQKMAQEQNKKKEEKMKELQDFIARFSANASKSKQATSRKKQLEKIELDDIQPSSRRYPFVKFTPEREIGNDLLIVQNLSKTIDGEKVLDNVSFTMNPNDKAILIGDSEIAKTTLLKILAGEMEPDEGSFKWGVTTSLSYFPKDNSEFFEGVNMNLVDWLRQYAPEDEQTETFLRGFLGRMLFSGEEVKKKASVLSGGEKVRCMLSKMMLSSANVLLLDEPTNHLDLESITAVNDGLKSFKGSIIFTSYDFEFINTIANRVIDLNKQGGVSKEIPYEEYLQEIGVLK

SEQ ID NO: 12511 - protein, 948 aa, Staphylococcus aureus
MKEPSIVVKGARAHNLKDIDIELPKNKLIVMTGLSGSGKSSLAFDTIYAEGQRRYVESLSAYARQFLGQMDKPDVDTIEGLSPAISIDQKTTSKNPRSTVATVTEIYDYIRLLYARVGKPYCPNHNIEIESQTVQQMVDQIMELEARTKIQLLAPVIAHRKGSHEKLIEDIGKKGYVRLRIDGEIVDVNDVPTLDKNKNHTIEVVVDRLVVKDGIETRLADSIETALELSEGQLTVDVIDGEDLKFSESHACPICGFSIGELEPRMFSFNSPFGACPTCDGLGQKLTVDVDLVVPDKDKTLNEGAIEPWIPTSSDFYPTLLKRVCEVYKINMDKPFKKLTERQRDILLYGSGDKEIEFTFTQRQGGTRKRTMVFEGVVPNISRRFHESPSEYTREMMSKYMTELPCETCHGKRLSREALSVYVGGLNIGEVVEYSISQALNYYKNINLSEQDQAIANQILKEIISRLTFLNNVGLEYLTLNRASGTLSGGEAQRIRLATQIGSRLTGVLYVLDEPSIGLHQRDNDRLINTLKEMRDLGNTLIVVEHDDDTMRAADYLVDIGPGAGEHGGQIVSSGTPQKVMKDKKSLTGQYLSGKKRIEVPEYRRPASDRKISIRGARSNNLKGVDVDIPLSIMTVVTGVSGSGKSSLVNEVLYKSLAQKINKSKVKPGLYDKIEGIDQLDKIIDIDQSPIGRTPRSNPATYTGVFDDIRDVFAQTNEAKIRGYQKGRFSFNVKGGRCEACKGDGIIKIEMHFLPDVYVPCEVCDGKRYNRETLEVTYKGKNIADILEMTVEEATQFFENIPKINRKLQTLVDVGLGYVTLGQQATTLSGGEAQRVKLASELHKRSTGKSIYILDEPTTGLHVDDISRLLKVLNRLVENGDTVVIIEHNLDVIKTADYIIDLGPEGGSGGGTIVATGTPEDIAQTKSSYTGKYLKEVLERDKQNTEDK

SEQ ID NO: 12512 - protein, 388 aa, Staphylococcus aureus
MRWIKRKKKNFLNSKFNFNNGKIATYLYKERTAMWNKNRLTQMLSIEYPIIQAGMAGSTTPKLVASVSNSGGLGTIGAGYFNTQQLEDEIDYVRQLTSNSFGVNVFVPSQQSYTSSQIENMNAWLKPYRRALHLEEPVVKITEEQQFKCHIDTIIKKQVPVCCFTFGIPNESIIKRLKEANIKLIGTATSVDEAIANEKAGMDAIVAQGSEAGGHRGSFLNPKNQLPMVGTISLVPQIVDVVSIPVIAAGGIMDGRGVLASIVLGAEGVQMGTAFLTSQDSNASELLRDAIINSKETDTVVTKAFSGKLARGINNRFIEEMSQYEGDIPDYPIQNELTSSIRKAAANIGDKELTHMWSGQSPRLATTHPANTIMSNIINQINQIMQYK

SEQ ID NO: 12513 - protein, 310 aa, Staphylococcus aureus
MLTTEKLVETLKLDLIAGEEGLSKPIKNADISRPGLEMAGYFSHYASDRIQLLGTTELSFYNLLPDKDRAGRMRKLCRPETPAIIVTRGLQPPEELVEAAKELNTPLIVAKDATTSLMSRLTTFLEHALAKTTSLHGVLVDVYGVGVLITGDSGIGKSETALELVKRGHRLVADDNVEIRQINKDELIGKPPKLIEHLLEIRGLGIINVMTLFGAGSILTEKRIRLNINLENWNKQKLYDRVGLNEETLSILDTEITKKTIPVRPGRNVAVIIEVAAMNYRLNIMGINTAEEFSERLNEEIIKNSHKSEE

SEQ ID NO: 12514 - protein, 323 aa, Staphylococcus aureus
MNFDIMFKDTLNRRVCVVMATKNEEILRKPDWLKIKLNTNENYTGLKKMMREKNLNTVCEEAKCPNIHECWGARRTATFMILGAVCTRACRFCAVKTGLPNELDLNEPERVAESVELMNLKHVVITAVARDDLRDAGSNVYAETVRKVRERNPFTTIEILPSDMGGDYDALETLMASRPDILNHNIETVRRLTPRVRARATYDRTLEFLRRSKELQPDIPTKSSIMVGLGETIEEIYETMDDLRANDVDILTIGQYLQPSRKHLKVQKYYTPLEFGKLRKVAMDKGFKHCQAGPLVRSSYHADEQVNEAAKEKQRQGEAQLNS

SEQ ID NO: 12515 - protein, 485 aa, Staphylococcus aureus; identical to SEQ ID NO: 5301

SEQ ID NO: 12516 - protein, 402 aa, Staphylococcus aureus
MAQDRKKVLVLGAGYAGLQTVTKLQKAISTEEAEITLINKNEYHYEATWLHEASAGTLNYEDVLYPVESVLKKDKVNFVQAEVTKIDRDAKKVETNQGIYDFDILVVALGFVSETFGIEGMKDHAFQIENVITARELSRHIEDKFANYAASKEKDDNDLSILVGGAGFTGVEFLGELTDRIPELCSKYGVDQNKVKITCVEAAPKMLPMFSEELVNHAVSYLEDCGVEFKIATPIVACNEKGFVVEVDGEKQQLNAGTSVWAAGVRGSKLMEESFEGVKRGRIVTKQDLTINGYDNIFVIGDCSAFIPAGEERPLPTTAQIAMQQGESVAKNIKRILNGESTEEFEYVDRGTVCSLGSHDGVGMVFGKPIAGKKAAFMKKVIDTRAVFKIGGIGLAFKKGKF

SEQ ID NO: 12517 - protein, 514 aa, Staphylococcus aureus
MSLKGFIVVQFEGSNISNLRRYIMNFKLNNTLSNEINTLIIGIPEHLNQLERISFNHIDITESLERLKHQHIIGSKVGKIYTTAFDVQDQTYRLITVGLGNLKTRSYQDMLKIWGHLFQYIKSEHIEDTYLLMDSFISKYDQLSDVLMACGIQSERATYEFDHYKSSKKAPFKTNLNLISESLIELDFIHEGISIGQSINLARDFSNMPPNVLTPQTFAEDIVNHFKNTKVKVEVKDYDTLVSEGFGLLQAVGKGSKHKPRLVTITYNGKDKDEVPIALVGKGITYDSGGYSIKTKNGMATMKYDMCGAANVVGIIEAASRLQLPVNIVGVLACAENMINEASMKPDDVFTALSGETVEVMNTDAEGRLVLADAVYYANQYQPSVIMDFATLTGAAIVALGDDKAAAFESNSKVILNDILQISSKVDEMVFELPITATERASIKHSDIADLVNHTNGQGKALFAASFVTHFSGQTPHIHFDIAGPATTNKASYNGPKGPTGFMIPTIVQWLKQQ

SEQ ID NO: 12518 - protein, 142 aa, Staphylococcus aureus
MNRQQNDLILQFAAVIIFFMVMVFGFSLFLAGHYTPGGGFVGGLLFASSLVIITIAFDIETMRKIFPLDFKILIGIGLVFCIATPIASWFLGKNFFTHVTFDIPLFILEPVHMTTAVFFDFGVLCAVVGTVMTIIISIGENE

SEQ ID NO: 12519 - protein, 801 aa, Staphylococcus aureus
MSLLHIAVILPLIFALIIPILYRFFKRIHLGWFVLPVPIVIFIYMLTLIKTTMSGNTVMKTLNWMPHFGMNFDLYLDGLGLLFSLLISGIGSLVVLYSIGYLSKSEQLGNFYCYLLLFMGAMLGVVLSDNVIILYLFWELTSFSSFLLISFWRERQASIYGAQKSLIITVFGGLSLLGGIILLAIPTQSFSIQYMIQHASEIQNSPFFIFAMILIMIGAFTKSAQFPFYIWLPDAMEAPTPVSAYLHSATMVKAGLYLIARMTPIFAASQGWIWTVTLVGLITLFWASLNATKQQDLKGILAFSTVSQLGMIMAMLGIGAISYHYQGDDSKIYAAAFTAAIFHLINHATFKGALFMITGAVDHSTGTRDVKKLGGLLTIMPISFTITVITALSMAGVPPFNGFLSKESFLETTFTASQANLFSVDTLGYLFPIIGIVGSVFTFVYSIKFIMHIFFGQYKPEQLPKKAHEVSILMLLSPAILATLVIVFGLFPGILTNSIIEPATSSINHTVIDDVEFHMFHGLTPAFLSTLVIYILGILLIVTFSYWVKLLQRQPGKLTFNYWYNRSANVIPNYSEKMTNSYVTDYSRNNLVIIFGALILLTFVTVFSVPFNINFKDVSPIRIFEVCIVILLLSAAFLILFAKSRLFSIIMLSAVGYAVSVLFIFFKAPDLALTQFVVESISTALFLLCFYHLPNLNRYNEKRSFQLTNALIAGGVGLSVIIIGLIAYGNRHFESISKFYQEHVYDLAHGKNMVNVILVDFRGMDTLFESSVLGIAGLAVYTMIKLRKKRQTQGNEVKNHE

SEQ ID NO: 12520 - protein, 443 aa, Staphylococcus aureus; identical to SEQ ID NO: 5226

SEQ ID NO: 12521 - protein, 194 aa, Staphylococcus aureus
MSKLKKELLEWIISIAVAFVILFIVGKFIVTPYTIKGESMDPTLKDGERVAVNIIGYKTGGLEKGNVVVFHANKNDDYVKRVIGVPGDKVEYKNDTLYVNGKKQDEPYLNYNLKHKQGDYITGTFQVKDLPNANPKSNVIPKGKYLVLGDNREVSKDSRAFGLIDEDQIVGKVSFRFWPFSEFKYNFNPENTKN

SEQ ID NO: 12522 - protein, 1158 aa, Staphylococcus aureus
MTLHAYLGRAGTGKSTKMLTEIKQKMKADPLGDPIILIAPTQSTFQLEQAFVNDPELNGSLRTEMLHFERLSHRIFQEVGSYSEQKLSKAATEMMIYNIVQEQQKYLKLYQSQAKYYGFSEKLTEQIQDFKKYAVTPEHLESFIADKNMQTRTKNKLEDIALIYREFEQRIQNEFITGEDALQYFIDCMPKSEWLKCADIYIDGFHNFSTIEYLIIKGLIKYAKSVTIILTTDGNHDQFSLFRKPSEVLRHIEEIANELNISIERQYFKQSYRFNNQDLKHLEQEFDALQINRVACQGHINILESATMREEINEIARRIIVDIRDKQLRYQDIAILYRDESYAYLFDSILPLYNIPYNIDTKRSMTHHPVMEMIRSLIEVIQSNWQVNPMLRLLKTDVLTTSYLKSAYLVDLLENFVLERGIYGKRWLDDELFNVEHFSKMGRKAHKLTEDERNTFEQVVKLKKDVIDKILHFEKQMSQAATVKDFATAFYESMEYFELPNQLMTERDELDLNGNHEKAEEIDQIWNGLIQILDDLVLVFGDEPMSMERFLEVFDIGLEQLEFVMIPQTLDQVSIGTMDLAKVDNKQHVYLVGMNDGTMPQPVTASSLITDEEKKYFEQQANVELSPTSDILQMDEAFVCYVAMTRAKRNVTFSYSLMGSSGDDKEISPFLNQIQSLFNQLEITNIPQYHEVNPLSLMQHAKQTKITLFEALRAWLDDEIVADSWLDAYQVIRDSDLLNQGLDYLMSALTFDNETVKLGETLSKELYGKEINASVSRFEGYQQCPFKHYASHGLKLNERTKYELQNFDLGDIFHSVLKYISERINGDFKQLDLKKIRQLTNEALEEILPKVQFNLLNSSAYYRYLSRRIGAIVETTLSALKYQGTYSKFMPKHFETTFRRKPRTTPELNAQTLTTTQGIPINIRGQIDRIDTYTKNDTSFVNIIDYKSSEGSATLDLTKVYYGMQMQMMTYMDIVLQNKQRLGLTDIVKPGGLLYFHVHEPRIKFKSWADIDEDKLEQDLIKKFKLSGLVNADQTVIDALDIRLEPKFTSDIVPVGLNKDGSLSKRGSQVADEATIYKFIQHNKENFIETASNIMDGHTEVAPLKYKQKLPCAFCSYQSVCHVDGMIDSKRYRTVDETINPIEAIQNINIDDEFGGEQ

SEQ ID NO: 12523 - protein, 1217 aa, Staphylococcus aureus
MTIPEKPQGVIWTDAQWQSIYATGQDVLVAAAAGSGKTAVLVERIIQKILRDGIDVDRLLVVTFTNLSAREMKHRVDQRIQEASIADPANAHLKNQRIKIHQAQISTLHSFCLKLIQQHYDVLNIDPNFRTSSEAENILLLEQTIDEVIEQHYDILDPAFIELTEQLSSDRSDDQFRMIIKQLYFFSVANPNPTNWLDQLVTPYEEEAQQAQLIQLLTDLSKVFITAAYDALNKAYDLFSMMDGVDKHLAVIEDERRLMGRVLEGGFIDIPYLTGHEFGARLPNVTAKIKEANEMMVDALEDAKLQYKKYKSLIDKVKSDYFSREADDLKADMQQLAPRVKYLARIVKDVMSEFNRKKRSKNILDFSDYEHFALQILTNEDGSPSEIAESYRQHFQEILVDEYQDTNRVQEKILSCIKTGDEHNGNLFMVGDVKQSIYKFRQADPSLFIEKYQRFTIDGDGTGRRIDLSQNFRSRKEVLSTTNYIFKHMMDEQVGEVNYDESAQLYYGAPYDESDHPVNLKVLVEADQEHSDLTGSEQEAHFIVEQVKDILEHQKVYDMKTGSYRSATYKDIVILERSFGQARNLQQAFKNEDIPFHVNSREGYFEQTEVRLVLSFLRAIDNPLQDIYLVGLMRSVIYQFKEDELAQIRILSPNDDYFYQSIVNYINDEAADAILVDKLKMFLSDIQSYQQYSKDHPVYQLIDKFYNDHYVIQYFSGLIGGRGRRANLYGLFNKAIEFENSSFRGLYQFIRFIDELIERGKDFGEENVVGPNDNVVRMMTIHSSKGLEFPFVIYSGLSKDFNKRDLKQPVILNQQFGLGMDYFDVDKEMAFPSLASVAYRAVAEKELVSEEMRLVYVALTRAKEQLYLIGRVKNDKSLLELEQLSISGEHIAVNERLTSPNPFHLIYSILSKHQSASIPDDLKFEKDIAQVEDSSRPNVNISIIYFEDVSTETILDNDEYRSVNQLETMQNGNEDVKAQIKHQLDYQYPYVNDTKKPSKQSVSELKRQYETEESGTSYERVRQYRIGFSTYERPKFLSEQGKRKANEIGTLMHTVMQHLPFKKERISEVELHQYIDGLIDKHIIEADTKKDIRMDEIMTFINSELYSIIAEAEQVYRELPFVVNQALVDQLPQGDEDVSIIQGMIDLIFVKDGVHYFVDYKTDAFNRRRGMTDEEIGTQLKNKYKIQMKYYQNTLQTILNKEVKGYLYFFKFGTLQL

SEQ ID NO: 12524 - protein, 300 aa, Staphylococcus aureus
MKFLSFKYNDKTSYGVKVKREDAVWDLTQVFADFAEGDFHPKTLLAGLQQNHTLDFQEQVRKAVVAAEDSGKAEDYKISFNDIEFLPPVTPPNNVIAFGRNYKDHANELNHEVEKLYVFTKAASSLTGGNATIPNHKDITDQLDYEGELGIVIGKSGEKIPKALALDYVYGYTIINDITDRKAQSEQDQAFLSKSLTGGCPMGPYIVTKDELPLPENVNIVTKVNNEIRQDGNTGEMILKIDELIEEISKYVALHPGDIIATGTPAGVGAGMQPPKFLQPGDEVKVTIDNIGTLTTYIAK

SEQ ID NO: 12525 - protein, 604 aa, Staphylococcus aureus
MNKTKGFTKYKKMRYMPGLDGLRAIAVLGIIIYHLNKQWLTGGFLGVDTFFVISGYLITSLLLKEYDDTGIIKLKSFWIRRLKRLLPAVIVLLMVVGTATLLLKSDNIIRVKHDIIAAIFYVSNWWYIAKDVNYFEQFSFMPLKHLWSLAIEEQFYIFFPVILVTLLLTIKKRYKIGFIFWGVSIISLGLMMFIYSINGDHSRVYFGTDTRLQTLLLGVILAFLWPPFKLKNDPPKVVKYVIDSIGSLSFIVLILLFFIINDETNWIYDGGFYLISILTLFIIASVVHPSTWIAKIFSNPVLVFIGKRSYSLYLWHFAVISFVHSYYVDGQIPVYVYFIDISLTIIFAELSYRFIETPFRKEGIKALNWRPSYIPQFIRMAIVVTLLIPFMLILVGAFNKYGKDIIGEKANSFDTTIEDNYLMRIAPIDNIHIDGLVSEKKKESSDVYNNIKPLLIGDSVMVDIGESFKSSVPKSRIDGKVGRQLYQTLPLVKANYSQYKKSSDQVVLELGTNGDFTVKQLDDLLNQFGKAKIYLVNTRVPRIYEANVNRLLADAAKRKSNVTLIDWYKRSQGHSEYFAPDGVHLEYKGVLALKDEILKALKKK

SEQ ID NO: 12526 - protein, 882 aa, Staphylococcus aureus
MQFDQLYKLEVKLMDINKMTYAVQSALQQAVELSQQHKLQNIEIEAILSAALNESESLYKSILERANIEVDQLNKAYEDKLNTYASVEGDNIQYGQYISQQANQLITKAESYMKEYEDEYISMEHILRSAMDIDQTTKHYINNKVEVIKDIIKKVRGGNHVTSQNPEVNYEALAKYGRDLVEEVRQGKMDPVIGRDEEIRNTIRILSRKTKNNPVLIGEPGVGKTAIVEGLAQRIVKKDVPESLLDKTVFELDLSALVAGAKYRGEFEERLKAVLKEVKESDGRIILFIDEIHMLVGAGKTDGAMDAGNMLKPMLARGELHCIGATTLNEYREYIEKDSALERRFQKVAVSEPDVEDTISILRGLKERYEVYHGVRIQDRALVAAAELSDRYITDRFLPDKAIDLVDQACATIRTEMGSNPTELDQVNRRVMQLEIEESALKNESDNASKQRLQELQEELANEKEKQAALQSRVESEKEKIANLQEKRAQLDESRQALEDAQTNNNLEKAAELQYGTIPQLEKELRELEDNFQDEQGEDTDRMIREVVTDEEIGDIVSQWTGIPVSKLVETEREKLLHLSDILHKRVVGQDKAVDLVSDAVVRARAGIKDPNRPIGSFLFLGPTGVGKTELAKSLAASLFDSEKHMIRIDMSEYMEKHAVSRLIGAPPGYIGHDEGGQLTEAVRRNPYSVILLDEVEKAHTDVFNVLLQILDEGRLTDSKGRSVDFKNTIIIMTSNIGSQVLLENVKETGEITESTEKAVMTNLNAYFKPEILNRMDDIVLFKPLSIDDMSMIVDKILTQLNIRLLEQRISIEVSDDAKAWLGQEAYEPQYGARPLKRFVQRQIETPLARMMIKEGFPEGTTIKVNLNSDNNLTFNVEKIHE

SEQ ID NO: 12527 - protein, 303 aa, Staphylococcus aureus
MDNNEKEKSKSELLVVTGLSGAGKSLVIQCLEDMGYFCVDNLPPVLLPKFVELMEQGNPSLRKVAIAIDLRGKELFNSLVAVVDKVKSESDVIIDVMFLEASTEKLISRYKETRRAHPLMEQGKRSLINAINEEREHLSQIRSIANFVIDTTKLSPKELKERIRRYYEDEEFETFTINVTSFGFKHGIQMDADLVFDVRFLPNPYYVVDLRPLTGLDKDVYNYVMKWKETEIFFEKLTDLLDFMIPGYKKEGKSQLVIAIGCTGGQHRSVALAERLGNYLNEVFEYNVYVHHRDAHIESGEKK

SEQ ID NO: 12528 - protein, 313 aa, Staphylococcus aureus
MNVGIKGFGAYAPEKIIDNAYFEQFLDTSDEWISKMTGIKERHWADDDQDTSDLAYEASVKAIADAGIQPEDIDMIIVATATGDMPFPTVANMLQERLGTGKVASMDQLAACSGFMYSMITAKQYVQSGDYHNILVVGADKLSKITDLTDRSTAVLFGDGAGAVIIGEVSEGRGIISYEMGSDGTGGKHLYLDKDTGKLKMNGREVFKFAVRIMGDASTRVVEKANLTSDDIDLFIPHQANIRIMESARERLGISKDKMSVSVNKYGNTSAASIPLSIDQELKNGKLKDDDTIVLVGFGGGLTWGAMTIKWGK

SEQ ID NO: 12529 - protein, 414 aa, Staphylococcus aureus
MSQNKRVVITGMGALSPIGNDVKTTWENALKGVNGIDKITRIDTEPYSVHLAGELKNFNIEDHIDKKEARRMDRFTQYAIVAAREAVKDAQLDINENTADRIGVWIGSGIGGMETFEIAHKQLMDKGPRRVSPFFVPMLIPDMATGQVSIDLGAKGPNGATVTACATGTNSIGEAFKIVQRGDADAMITGGTEAPITHMAIAGFSASRALSTNDDIETACRPFQEGRDGFVMGEGAGILVIESLESAQARGANIYAEIVGYGTTGDAYHITAPAPEGEGGSRAMQAAMDDAGIEPKDVQYLNAHGTSTPVGDLNEVKAIKNTFGEAAKHLKVSSTKSMTGHLLGATGGIEAIFSALSIKDSKVAPTIHAVTPDPECDLDIVPNEAQDLDITYAMSNSLGFGGHNAVLVFKKFEA

SEQ ID NO: 12530 - protein, 331 aa, Staphylococcus aureus
MRQIKVVLIGGGTGLSVMARGLREFPIDITAIVTVADNGGSTGKIRDEMDIPAPGDIRNVIAALSDSESVLSQLFQYRFEENQISGHSLGNLLIAGMTNITNDFGHAIKALSKILNIKGRVIPSTNTSVQLNAVMEDGEIVFGETNIPKKHKKIDRVFLEPNDVQPMEEAIDALREADLIVLGPGSLYTSVISNLCVNGISDALIHSDAPKLYVSNVMTQPGETDGYSVKDHIDAIHRQAGQSFIDYVICSTQTFNAQVLKKYEEKHSKPVEVNKAELEKESINVKTSSNLVEISENHLVRHNTKVLSTMIYDIALELISTIPFVPSDKRK

SEQ ID NO: 12531 - protein, 314 aa, Staphylococcus aureus; identical to SEQ ID NO: 5616

SEQ ID NO: 12532 - protein, 329 aa, Staphylococcus aureus
METLFSGIQPSGIPTIGNYIGALKQFVDVQNDYDCYFCIVDQHAITMPQDRLKLRKQTRQLAAIYLASGIDPDKATLFIQSEVPAHVQAGWMLTTIASVGELERMTQYKDKAQKAVEGIPAGLLTYPPLMAADIVLYNTNIVPVGDDQKQHIELTRNLVDRFNSRYNDVLVKPEIRMPKVGGRVMSLQDPTRKMSKSDDNAKNFISLLDEPNVAAKKIKSAVTDSDGIIKFDRDNKPGITNLISIYAGLTDMPIKDIEAKYEGEGYGKFKGDLAEIVKAFLVEFQEKYESFYNSDKLDDILDQGRDKAHKVSFKTVKKMEKAMGLGRKR

SEQ ID NO: 12533 - protein, 121 aa, Staphylococcus aureus
MTTTPYDIIGKEALYDMIDYFYTLVEKDERLNHLFPGDFAETSRKQKQFLTQFLGGPNIYTEEHGHPMLRKRHMAFTITEFERDAWLENMQTAINRAAFPQGVGDYLFERLRLTANYMVNS

SEQ ID NO: 12534 - protein, 211 aa, Staphylococcus aureus
MNQWDQFLTPYKQAVDELKVKLKGMRKQYEVGEQASPIEFVTGRVKPIASIIDKANKRQIPFDRLREEMYDIAGLRMMCQFVEDIDVVVNILRQRKDFKVIEERDYIRNTKESGYRSYHVIIEYPIETLQGQKFILAEIQIRTLAMNFWATIEHTLRYKYDGAYPDEIQHRLERAAEAAYLLDEEMSEIKDEIQEAQKYYTQKRSKKHEND

SEQ ID NO: 12535 - protein, 256 aa, Staphylococcus aureus; identical to SEQ ID NO: 5228

SEQ ID NO: 12536 - protein, 557 aa, Staphylococcus aureus
MLNRIIFLCLNNRGNLMIEKLVTFLNEVVWSKPLVYGLLITGVLFTLRMRFFQVRHFKEMIRLMFQGEKSPNGISSFQAIAMSLAGRVGTGNIVGVSTAIFIGGPGAVFWMWITAFLGASSAFIESTLGQIFKRVENNEYRGGPAYYIEYGIGGKFGKIYGIIFAIVTIISVGLLLPGVQSNAIASSMHNAIHVTQWLMGGIVVVILGLIIFGGVRSIANVATAIVPFMAIIYILMAVIIICINIQEVPALFALIFKSAFGLQSAFGGIVGAMIEIGVKRGLYSNEADQGTGPHAAAAAEVSHPSKQGLVQAFSVYIDTLFVCTATALIILISGTYNVTDGTLNANGTPHLIKDGGIYVENATGKDYSGTAMYAQAGIDKAFHGSGYQFDPTFSGVGSYFIAFALFFFAFTTILSYYYITETNVAYLTRNQNNQVSSVFINIARVIILFATFYGAVKTADVAWAFGDLGVGLMAWLNIIAIWILHKPAVNALKDYEIQKKRLGNGYNAVYQPDPNKLPNAVFWLKTYPERLKQARVKKQSTFVYSICSDHLIKKKKY

SEQ ID NO: 12537 - protein, 504 aa, Staphylococcus aureus
MMEKNENINVEILTTSDMHSHFLNGDYGSNIYRAGTYVNQVRAQNHRVILLDSGGSLAGSLAAYYYAIVAPYKRHPMIKLMNRMHYDASGVSPSEFKFGLSFLTRSIALARFPWLSANIEYNVTKEPYFSTPYCIKHFGDLKIAIVGVTADGLMENEYSEMEQDVSIEKTLVASKRWIRYIHEVEEPDFLIVIYHGGLNKISNSTKNKKASSNEAEKLMEELGVIDLMITAHQHQTIVGQDHETYYVQAGQDAKELVHLSINFKKRTTTYDVESIDSKVIDLNEYEEDQELLDLTFYDRKAVAYWSQEIISDKGLMLSVNGLQDLVCQTHPFSQLLHDAIHLAFDNDITCVHVPMNGEKGLSGQIRNEDLYHAYPYPDKPMDMTISGQNIKDILEYSYSHLDFVNEQLSLTIIDETLCTMWQGFNYEIDMNQEPGQRVMLDQIDLTKSYRVTMTDYCYRNYKNYLKNAIIHESYDETMSTIIAEKLRDPNYRISCSDNFVVKNR

SEQ ID NO: 12538 - protein, 302 aa, Staphylococcus aureus
MIMKQYLITGGTGMVGSQLVNEIKKSDSHITILTRHDQISNDKKISYVNWAKSGWEHKVPQNIDVVINLAGATLNKRWTPEYKQTLMLSRIQSTQALYELFKSRNKASKVLFNASATGYYPPDLFMSYTEVYKTLPFDFLSDIVYQWERFAQQFEQLGTRVVIGRFGIILSNEGGALQTMKLPYEYYIGGKLGSGQQWYSWIHINDLIQAILFLINNESASGPFNLTAPIPERQNLFGYTLARAMHKPHETWAPSLAMRLILGQMSTVVLDTQKVLPNKIQALGFQFKYSNLKMALEDLISK

SEQ ID NO: 12539 - protein, 337 aa, Staphylococcus aureus
MKDLLQAQQKLIPDLIDKMYKRFSILTTISKNQPVGRRSLSEHMDMTERVLRSETDMLKKQDLIKVKPTGMEITAEGEQLISQLKGYFDIYADDNRLSEGIKNKFQIKEVHVVPGDADNSQSVKTELGRQAGQLLEGILQEDAIVAVTGGSTMACVSEAIHLLPYNVFFVPARGGLGENVVFQANTIAASMAQQAGGYYTTMYVPDNVSETTYNTLLLEPSVINTLDKIKQANVILHGIGDALKMAHRRQSPEKVIEQLQHHQAVGEAFGYYFDTQGQIVHKVKTIGLQLEDLESKDFIFAVAGGKSKGEAIKAYLTIAPKNTVLITDEAAAKIILE

SEQ ID NO: 12540 - protein, 336 aa, Staphylococcus aureus; identical to SEQ ID NO: 5618

SEQ ID NO: 12541 - protein, 396 aa, Staphylococcus aureus
MAKKIVSDLDLKGKTVLVRADFNVPLKDGEITNDNRIVQALPTIQYIIEQGGKIVLFSHLGKVKEESDKAKLTLRPVAEDLSKKLDKEVVFVPETRGEKLEAAIKDLKEGDVLLVENTRYEDLDGKKESKNDPELGKYWASLGDVFVNDAFGTAHREHASNVGISTHLETAAGFLMDKEIKFIGGVVNDPHKPVVAILGGAKVSDKINVIKNLVNIADKIIIGGGMAYTFLKAQGKEIGISLLEEDKIDFAKDLLEKHGDKIVLPVDTKVAKEFSNDAKITVVPSDSIPADQEGMDIGPNTVKLFADELEGAHTVVWNGPMGVFEFSNFAQGTIGVCKAIANLKDAITIIGGGDSAAAAISLGFENDFTHISTGGGASLEYLEGKELPGIKAINNK

SEQ ID NO: 12542 - protein, 434 aa, Staphylococcus aureus [sequence omitted]

SEQ ID NO: 12543 - protein, 157 aa, Staphylococcus aureus; identical to SEQ ID NO: 5620

SEQ ID NO: 12544 - protein, 1021 aa, Staphylococcus aureus; identical to SEQ ID NO: 5471

SEQ ID NO: 12545 - protein, 196 aa, Staphylococcus aureus
MLLLAKTLYLMRHGQTLFNFKGLIQGFGDSPLTELGIAQAQKARSYYETKGINFDLYASSTQERASDTLENVAPNHSYQRFKGLKEWHFGLFEGESVYLFDNLYKPEDLFGDRIVPFKGEARQQVEDRVVKTLHDIMSQTKNNALVVSHGTIMGVFLRYCLKLDEALKHNIGNCNILKFEYDNGTFKFVELIDPNL

SEQ ID NO: 12546 - protein, 179 aa, Staphylococcus aureus
MELQQAIANRRSVKKFKRDMHIDDALLYQAIEKAADAPNHGMREPWRVVHVPKDRLGDMSKDISKFAFPNELDKQQCHYDAVTKLGGMLLLILKTDPRQRQNDENYFAFGAYAQNLMLLLYEAGIGTCWKSPLYIYDPKVRKTLGIKKDEVLAGFLYLTDLEEDMPKAPRKNRNLITLY

SEQ ID NO: 12547 - protein, 231 aa, Staphylococcus aureus
MGKSFSEIINEMITMPNIQWPEVWTAIVETLYMTVVSTIFAFILGLILGVLLFLSAKGKSIGARLFYSIVSFIVNLFRAIPFIILILLLIPFTSLILGTISGPTGALPALIIGAAPFYARLVEIAFKEIDKGVIEAAWSMGANTWTVIRKVLLPEAMPALVSGITVTAIALVGSTAVAGVIGAGGLGNLAYLTGFTRNQNDVILVSTVFILIIVFIIQFIGDWLTNKLDKR

SEQ ID NO: 12548 - protein, 273 aa, Staphylococcus aureus
MKKLFGLILVLTFAVVLAACGNGSKSGSDDKKITVGASPAPHAEILEKAKPLLEKKGYELDIKTINDYTTPNKLLDKGEIDANYFQHTPYLNTEKKDKGYKIVSAGDVHLEPMAVYSKKYKSLKELPKGATVYVSNNPAEQGRFLKFFVDAGLIKIKKGVKIEDAKFSDITENKKDIKFNNKQSAEFLPKIYQNEDADAVIINSNFAIEQKLNPKKDSIAVESAKDNPYANLIAVKEGHQDDKKIKALIEVLQSKDIQDFINEKYNGAVIPAK

SEQ ID NO: 12549 - protein, 64 aa, Staphylococcus aureus; identical to SEQ ID NO: 5476

SEQ ID NO: 12550 - protein, 253 aa, Staphylococcus aureus
MASTLEIKDLHVSIEDKEILKGVNLTINTDEIHAIMGPNGTGKSTLSSAIMGHPSYEVTKGEVLLDGVNILELEVDERAKAGLFLAMQYPSEITGVTNADFMRSAINAKREEGQEINLMQFIKKLDKNMDFLDIDKDMAQRYLNEGFSGGEKKRNEILQLMMLEPKFAILDEIDSGLDIDALKVVSKGINQMRGENFGALMITHYQRLLNYITPDKVHVMYAGKVVKSGGPELAKRLEEEGYEWVKEEFGSAE

SEQ ID NO: 12551 - protein, 154 aa, Staphylococcus aureus
MNFNNLDQLYRSVIMDHYKNPRNKGVLDNGSMTVDMNNPTCGDRIRLTFDIEDGIIKDAKFEGEGCSISMASASMMTQAVKGHSLGEAMQMSQEFTKMMLGEDYVITEEMGDIEALQGVSQFPARIKCATLAWKALEKGTVAKEGKAEGTTEEE

SEQ ID NO: 12552 - protein, 843 aa, Staphylococcus aureus; identical to SEQ ID NO: 5370

SEQ ID NO: 12553 - protein, 588 aa, Staphylococcus aureus
MSKRTTYCGLVTEAFLGQEITLKGWVNNRRDLGGLIFVDLRDREGIVQVVFNPAFSEEALKIAETVRSEYVVEVQGTVTKRDPETVNPKIKTGQVEVQVTNIKVINKSETPPFSINEENVNVDENIRLKYRYLDLRRQELAQTFKMRHQITRSIRQYLDEEGFFDIETPVLTKSTPEGARDYLVPSRVHDGEFYALPQSPQLFKQLLMISGFDKYYQIVKCFRDEDLRADRQPEFTQVDIEMSFVDQEDVMQMGEEMLKKVVKEVKGVEINGAFPRMTYKEAMRRYGSDKPDTRFEMELIDVSQLGRDMDFKVFKDTVENDGEIKAIVAKGAAEQYTRKDMDALTEFVNIYGAKGLAWVKVVEDGLTGPIGRFFKTENVETLLTLTGAEAGDLVMFVADKPNVVAQSLGALRVKLAKELGLIDETKLNFLWVTDWPLLEYDEDAKRYVAAHHPFTSPKEADIAKLGTAPEEAEANAYDIVLNGYELGGGSIRIHDGELQEKMFEVLGFTKEQAQEQFGFLLDAFKYGAPPHGGIALGLDRLVMLLTNRTNLRDTIAFPKTASATCLLTNAPGEVSDKQLEELSLRIRH

SEQ ID NO: 12554 - protein, 60 aa, Staphylococcus aureus; identical to SEQ ID NO: 5488

SEQ ID NO: 12555 - protein, 361 aa, Staphylococcus aureus
MSGGVDSSVTAHVLKEQGYDVIGIFMKNWDDTDENGVCTATEDYNDVIEVCNQIGIPYYAVNFEKEYWDKVFTYFLDEYKKGRTPNPDVMCNKEIKFKAFLDHAMNLGANYVATGHYARIHRHEDGHVEMLRGVDNNKDQTYFLNQLSQQQLSKVMFPIGDIEKSEVRRIAEEQGLVTAKKKDSTGICFIGEKNFKTFLSQYLPAQPGDMITLDGKKMGKHSGLMYYTIGQRHGLGIGGDGDPWFVVGKNLKDNVLYVEQGFHHDALYSDYLIASDYSFVNPEDNDLDQGFECTAKFRYRQKDTKVFVKRENDHALRVTFAEPVRAITPGQAVVFYQGDVCLGGATIDDVFKNEGQLNYVV

SEQ ID NO: 12556 - protein, 877 aa, Staphylococcus aureus
MMKKLKASEIRQKYLDFFVEKGHMVEPSAPLVPIDDDTLLWINSGVATLKKYFDGRETPKKPRIVNSQKAIRTNDIENVGFTARHHTFFEMLGNFSIGDYFKQEAIEFAWEFLTSDKWMGMEPDKLYVTIHPEDMEAYNIWHKDIGLEESRIIRIEGNFWDIGEGPSGPNTEIFYDRGEAYGQDDPAEEMYPGGENERYLEVWNLVFSEFNHNKDHSYTPLPNKNIDTGMGLERMASVSQNVRTNYETDLFMPIMNEIEKVSGKQYLVNNEQDVAFKVIADHIRTIAFAISDGALPANEGRGYVLRRLLRRAVRFSQTLGINEPFMYKLVDIVADIMEPYYPNVKEKADFIKRVIKSEEERFHETLEDGLAILNELIKKAKETTNEINGKDAFKLYDTYGFPIELTEEIAVQAGLKVDMTTFESEMQQQRDRARQARQNSQSMQVQSEVLKNITSASTFVGYDTATAQTTLTHLIYNGEEVSQVEAGETVYFMLTETPFYAVSGGQVADTGIVYNDNFEIAVSEVTKAPNGQNLHKGVVQFGQVNVGATVSAEVNQNDRRDIQKNHSATHLLHAALKSVLGDHVNQAGSLVEADRLRFDFSHFGPMTNDEIDQVERLVNEEIWKGIDVNIQEMDIASAKEMGAMALFGEKYGDVVRVVNMAPFSIELCGGIHVRNTSEIGLFKIVSESGTGAGVRRIEALTGKAAFLYLEDIQEKFNTMKSQLKVKSDDQVVDKLTQLQDEEKALLKQLEQRDKEITSLKMGNIEDQVEEINGYKVLVTEVDVPNAKAIRSTMDDFKSKLQDTIIILASNVDDKVSMVATVPKSLTNNVKAGDLIKQMAPIVGGKGGGRPDMAQGGGTQPENISKSLSFIKDYIKNL

SEQ ID NO: 12557 - protein, 89 aa, Staphylococcus aureus
MSQMENFDKTMKFDYEELPTQDVRDVLNNVYRTLDERGYNAVNQIVGYLLSGDPAYIPRQNEARNQIRHIDRDVIMEELVSYYLKEQNK

SEQ ID NO: 12558 - protein, 142 aa, Staphylococcus aureus
MLQHKILGLDVGSRTVGIAISDIMGWTAQGLDTLRINEENNELGIDQLVDIIKKHNVGTVVIGLPKNMNNSIGFRGEASLTYKEKLLEAYPSIEIVMWDERLSTMAAERSLLEADVSRQKRKQVIDKMAAVFILQGYLDSLH

SEQ ID NO: 12559 - protein, 102 aa, Staphylococcus aureus; identical to SEQ ID NO: 5417

SEQ ID NO: 12560 - protein, 422 aa, Staphylococcus aureus
MKTIEEIKSTPKTVMKKPELLAPAGNLEKLKIAVHYGADAVFLGGQEYGLRSNADNFTMEEIAEGVEFANRYGAKIYVTTNIIAHDENIEGLESYLRNLEKTGATGIIVADPLIIETCKEVAPKLEIHLSTQQSLSNYKAVEYWKEEGLDRVVLARETGAMEMREMKEKVDIEIEAFIHGAMCIAYSGRCTLSNHMTARDSNRGGCCQSCRWDYELLEVDDNGELDVFYNQGEVTPFAMSPKDLKLIESIPQMMDIGVDSLKIEGRMKSIHYIATVVSVYRKVIDAYAADPDNFKINPEWLIELDKCANRDTAPAFFEGTPGYEEQMFGQQQSKKSPFDFCGLVLDYNEDTKIATIQQRNNFKPGQEIEFFGPEIETFTQVVEAIYDEEGNSLDAARHPLQIVQIKVDRPIYPNNMMRKEIG

SEQ ID NO: 12561 - protein, 205 aa, Staphylococcus aureus
MYSVISKILNFILVKMSKSLYVIGKDNIPKDSKYVVTCTHESYNEVIMLGMALYPNQIHYMAKKELFKNKWIGKFLTSLNAFPVDRENPGPSTLKRPINLLKDNKTVGIFPTGSRTSQEGAPLKRGASTIAMLSKSPILPVAYVGPTKIHGLLTGQAYINIGKPIDINDLPKDLKRNERIDYITKEIETRTAKLQQELHEIVKSL

SEQ ID NO: 12562 - protein, 453 aa, Staphylococcus aureus
MLRCLIANRGEIAVRIIRACREYGIETVAVYAKGDEQSLHVHLADQAICIGEANALDSYLNIDRIISAAQITGANAIHPGYGFLSESTKFAQTVEEQGIAFIGPTKNTMEMMGDKITARQTVHHAGVPVIPGSNGAVNHVSEIEKLAKDIGYPVVIKAASGGGGKGIRIVKKAEDLEKAFKEAKSEGKKYFDDDRVYVEAFIPVAKHVEVQVMGDGQDNYVHLGERDCSVQRKNQKLIEESPCAALTEERRQQICNDAVKVARAANYRSAGTIEFLVTDTAHYFIEMNARIQVEHTVTEMRAERDLVAAQLYLLEHNHLPFSQSDIQFNGHVIEARINAENPEKKFQPTPGKVTALHLPQGFNVRVDSLLYHGYQVSPYYDSLVAKVIVKSHDRASAIDKLKATLDEMVIDGFSTTADFLYAVLNYPLYRDGDAKDVDIKFLEKHQIVKGVEL

SEQ ID NO: 12563 - protein, 250 aa, Staphylococcus aureus
MRVDLNCDLGEAFGNYSFGGDHQIIPLITSANVACGFHAGDENVMNETVKLAKAHNVAVGAHPGFPDLKGFGRRNIDISNDEIYNLMIYQLGALQGFCRIHQVKINHVKPHGALYQMGAKDREIASVIAQAVYDFDPSLVLVGLANSYLISEAKNVGLITASEVFADRRYEDDGQLVSRKESDAVITDTDEALKQVLKMVKENKVISKNNKEVTLQADTICVHGDGEHALLFVSKIREILMKEGIDIQSL

SEQ ID NO: 12564 - protein, 488 aa, Staphylococcus aureus
MYKFFQNLGRSLMLPVAILPAAAIIAGIGNTLNALHAAPKIAMFFTTVGTTILEQLGILFAIGVAIGMAKKNDGAVALAAALGYFLVTVVLSPMKLAPLLGMKASEINSAFEKMNNGNVFVGIVIGLIAAYAYNKFSETELPLALSFFSGKRLVPIMTAFYCTFLVVILLFLWPLLYSWIVKFGESIVGLGSFGAFVYGVANRLLIPTGLHHALNSVFWFDTIGINDIGKFQSGKDAIKGITGRYQAGFFPIMMFGIPAAALAMYHTAKTTQKKQVYGWFLASSVAAFFVGVTEPIEFAFMFVAPILYVVHALLTGLSLFIAATFHWTAGFSFSAGLIDYVLSLINPVSNHPLMLLVQGVVFFILYYVIFRVVIQVFNLNTIGRGENELVDPTVVKDNIAPGENDIKQSKYHNHAIQILEGLGGQENIVNLTNCATRLRLELKDTSIIDQQKIKNAGAVGVTVNGKHSTQVIVGTHVQQVADEIEKHL

SEQ ID NO: 12565 - protein, 337 aa, Staphylococcus aureus
MFRDDVICRRCFRLKNYNEVQDVGLESEDFLKLLSGLADKKGIVVNVVDVFDFEGSFINAVKRIVGNKKIILAANKLDLLPKQINKRRVKEWLKRTARKYGLEADDVVLISAEKGWGIDDLLSSIANIRENEDVYIVGTTNVGKSTLINKLIEASVGEKDVVTTSRFPGTTLDMIDIPLDETSFMYDTPGIIQDHQMTHLVSEKELKIIMPKKEIKQRVYQLNEAQTLFFGGLARIDYVSGGKRPLVCFFSNDLNIHRTKTEKANDLWRNQLGDLLTPPGNPQNFDLSEVKAVRLETGKEKRDVMISGLGFITIGPGAKVIVRVPKNVDVVLRNSIL

SEQ ID NO: 12566 - protein, 268 aa, Staphylococcus aureus
MKFAVIGNPISHSLSPVMHRANFNSLGLDDTYEALNIPIEDFHLIKEIISKKELDGFNITIPHKERIIPYLDHIDEQAINAGAVNTVLIKDGKWIGYNTDGVGYVKGLHSVYPDLENAYILILGAGGASKGIAYELAKFVKPKLTVANRTMARFESWNLNINQISLADAEKYLAEFDIVINTTPAGMAGNNESIINLKHLSPNTLMSDIIYIPYKTPILEEAERKGNHIYNGLDMFVYQGAESFKIWTNKDADINSMKTAVLQQLKGE

SEQ ID NO: 12567 - protein, 618 aa, Staphylococcus aureus
MIKWRNFIMSKIIGIDLGTTNSCVTVLEGDEPKVIQNPEGSRTTPSVVAFKNGETQVGEVAKRQAITNPNTVQSIKRHMGTDYKVDIEGKSYTPQEISAMILQNLKNTAESYLGEKVDKAVITVPAYFNDAERQATKDAGKIAGLEVERIINEPTAAALAYGLDKTDKDEKVLVFDLGGGTFDVSILELGDGVFEVLSTAGDNKLGGDDFDQVIIDYLVAEFKKENGVDLSQDKMALQRLKDAAEKAKKDLSGVSQTQISLPFISAGENGPLHLEVNLTRSKFEELSDSLIRRTMEPTRQAMKDAGLTNSDIDEVILVGGSTRIPAVQEAVKKEIGKEPNKGVNPDEVVAMGAAIQGGVITGDVKDVVLLDVTPLSLGIEILGGRMNTLIERNTTIPTSKSQIYSTAVDNQPSVDVHVLQGERPMAADNKTLGRFQLTDIPPAERGKPQIEVTFDIDKNGIVNVTAKDLGTNKEQRITIQSSSSLSDEEIDRMVKDAEVNAEADKKRREEVDLRNEADSLVFQVEKTLTDLGENIGEEDKKSAEEKKDALKTALEGQDIEDIKSKKEELEKVIQELSAKVYEQAAQQQQQAQGANAGQNNDSTVEDAEFKEVKDDDKK

SEQ ID NO: 12568 - protein, 58 aa, Staphylococcus aureus
MSKTVVRKNESLEDALRRFKRSVSKSGTIQEVRKREFYEKPSVKRKKKSEAARKRKFK

SEQ ID NO: 12569 - protein, 232 aa, Staphylococcus aureus; identical to SEQ ID NO: 5560

SEQ ID NO: 12570 - protein, 386 aa, Staphylococcus aureus
MYYHQPLLLTPGPTPVPDAIMREIQAPMVGHRSKDFEDIAQQAFQGLKPIFGSQNDVLILTSSGTSVLEASMLNIVNPEDHFVVIVSGAFGNRFKQIAQTYYKNVHIYDVTWGEAVDVKDFINYLSTLNVEVKAVFSQYCETSTTVLHPIHELGNAINQFNSNIYFVVDGVSCIGAVDVDINKDKIDVLVSGSQKAIMLPPGLAFVAYSHRAKERFKEVTTPKFYLDLNKYISSQADNSTPFTPNVSLFRGVNAYVETVKAEGFNHVIARHYAIRNALRSALKALDLTLLVNDKDASPTVTAFKPNTNDEVKIIKDELKNRFKITIAGGQGHLKGQILRIGHMGKISPFDILSVVSALEIILTEHRKVNYIGKGISKYMEVIHEAI

SEQ ID NO: 12571 - protein, 299 aa, Staphylococcus aureus
MTEHKSGFVSIIGRPNVGKSTFVNRVIGHKIAIMSDKAQTTRNKIQGVMTRDDAQIIFIDTPGIHKPKHKLGDYMMKVAKNTLSEIDAIMFMVNANEEIGRGDEYIIEMLKNVKTPVFLVLNKIDLVHPDELMPKIEEYQSYMDFTEIVPISALEGLNVDHFIDVLKTYLPEGPKYYPDDQISDHPEQFVVGEIIREKILHLTSEEIPHAIGVNVDRMVKESEDRVHIEATIYVERDSQKGIVIGKGGKKLKEVGKRARRDIEMLLGSKVYLELWVKVQRDWRNKVNFIRQIGYVEDQD

SEQ ID NO: 12572 - protein, 463 aa, Staphylococcus aureus
MAKDMDTIVSLAKHRGFVFPGSDIYGGLSNTWDYGPLGVELKNNVKKAWWQKFITQSPFNVGIDAAILMNPKVWEASGHLNNFNDPMIDNKDSKIRYRADKLIEDYMQDVKGDENFIADGLSFEQMKKIIDDEGIVCPVSKTANWTEIRQFNLMFKTFQGVTEDSTNEIFLRPETAQGIFVNYKNVQRSMRKKLPFGIGQIGKSFRNEITPGNFIFRTREFEQMELEFFCKPGEEIEWQNYWKTFASDWLTSLNMSSENMRLRDHDEDELSHYSNATTDIEYKFPFGWGELWGIASRTDFDLRKHAEHSGEDFRYHDPETNEKYIPYCIEPSLGADRVTLAFLCDAYDEEGVEGSKDARTVLHFHPALAPYKAAILPLSKKLSGEAIKIFEQLSSKFSIDFDESQSIGKRYRRQDEIGTPYCVTFDFDSLEDNQVTVRDRDSMEQVRMPISELEAFLTEKTKF

SEQ ID NO: 12573 - protein, 100 aa, Staphylococcus aureus
MLVSAASSCYIISLAATLERAKFTDISIEQQSIGTACLNNGKFSMSKIVHHPHIEIPSDQIAQLEKRLPKLITIADNNCMISNAVRNNVDIKIYPIIQAK

SEQ ID NO: 12574 - protein, 448 aa, Staphylococcus aureus
MAKHPFEQFNLESSLIDAVKDLNFEKPTEIQNRIIPRILKRTNLIGQSQTGTGKSHAFLLPLMQLIDSEIKEPQAIVVAPTRELAQQLYDAANHLSQFKAGVSVKVFIGGTDIEKDRQRCNAQPQLIIGTPTRINDLAKTGHLHVHLASYLVIDEADLMIDLGLIEDVDYIAARLEDNANIAVFSATIPQQLQPFLNKYLSHPEYVAVDSKKQNKKNIEFFLIPTKGAAKVEKTLNLIDILNPYLCIIFCNSRDNANDLARSLNEAGIKVGMIHGGLTPRERKQQMKRIRNLEFQYVIASDLASRGIDIEGVSHVINFDVPNDIDFFTHRVGRTGRGNYKGVAITLYSPDEEHNISLIEDRGFVFNTVDIKDGELKEVKAHNQRQARMRKDDHLTNQVKNKVRSKIKNKVKPGYKKKFKQEVEKMKRQERKQFSKQQNRQKRKQNKKG

SEQ ID NO: 12575 - protein, 299 aa, Staphylococcus aureus
MCFMLLGSHVSMSGKKMLEGSAIEAHEYGETTFMIYTGAPQNTRRKSIEDLNITKGHEVMEKYGLSNIVVHAPYIINIANTTKPETFNLGVDFLQQEIERTQAIGAKDIVLHPGAHVGAGVDAGINKIIEGLNEVLTNDNNVRIALETMAGKGTEIGRSFEELARIIDGVHNNERLSVCFDTCHTHDAGYNVKEDFDGVLNEFDKIIGVDRIKVVHVNDSKNDRGAQKDRHENIGFGYIGFDALNYIVHHNSFKDIPKILETPYVGEDKKNKKPPYKLEIEMLKQQQFDPELKNKVMQQ

SEQ ID NO: 12576 - protein, 136 aa, Staphylococcus aureus
MNTNDAIKILKENGLKYTDKRKDMLDIFVEEDKYINAKYIQQVMDENYPGISFDTIYRNLHLFKDLGIIENTELDGEMKFRIACTNHHHHHFICEKCGDTKVIDYCPIDQIKLSLPGVNIHKHKLEVYGVCESCQD

SEQ ID NO: 12577 - protein, 664 aa, Staphylococcus aureus
MIVFIFAVLVLRLGYLQIAQGSHYKQIIKNDENITVNESVPRGRILDRNGKVLVDNASKMAITYTRGRKTTQSEMLDTAEKLSKLIKMDTKKITERDKKDFWIQLHPKKAKAMMTKEQAMLADGSIKQDQYDKQLLSKIGKSQLDELSSKDLQVLAIFREMNAGTVLDPQMIKNEDVSEKEYAAVSQQLSKLPGVNTSMDWDRKYPYGDTLRGIFGDVSTPAEGIPKELTEHYLSKGYSRNDRVGKSYLEYQYEDVLRGKKKEMKYTTDKSGKVTSSEVLNPGARGQDLKLTIDIDLQKEVEALLDKQIKKLRSQGAKDMDNAMMVVQNPKNGDILALAGKQINKSGKMTDYDIGTFTSQFAVGSSVKGGTLLAGYQNKAIKVGETMVDEPLHFQGGLTKRSYFNKNGHVSINDKQALMHSSNVYMFKTALKLAGDPYYSGMALPSDISSPAQKLRRGLNQVGLGVKTGIDLPNETRGQIEPLTNNPGNYLDLSIGQYDTYTPLQLSQYVSTIANDGYRIQPHIGLTIHESTNKDEVGPLKKKINGTVLNKVNNTEKEIKQIQEGFKMAFNDKDGTGYVSFKDTVVPTAGKTGTAEVFQNGEPRVNSTYIGYAPIDDPKLAFSIVYTNQPVPPPWLTGGDLGRDVINYYFKQLGKDDKNKDKDK

SEQ ID NO: 12578 - protein, 200 aa, Staphylococcus aureus; identical to SEQ ID NO: 5404

SEQ ID NO: 12579 - protein, 363 aa, Staphylococcus aureus
MSSDLKQTPLYQNYVDRGAKIVEFGGWAMPVQFSSIKEEHNAVRYEIGLFDVSHMGEIEVTGKDASQFVQYLLSNDTDNLTTSKALYTALCNEEGGIIDDLVIYKLADDNYLLVVNAANTEKDFNWILKHKEKYDVEVQNVSNQYGQLAIQGPKARDLINQLVDEDVTEMKMFEFKQGVKLFGANVILSQSGYTGEDGFEIYCNIDDTEKIWDGLLEYNVMPCGLGARDTLRLEAGLPLHGQDLTESITPYEGGIAFASKPLIDADFIGKSVLKDQKENGAPRRTVGLELLEKGIARTGYEVMDLDGNIIGEVTSGTQSPSSGKSIALAMIKRDEFEMGRELLVQVRKRQLKAKIVKKNQIDK

SEQ ID NO: 12580 - protein, 353 aa, Staphylococcus aureus
MSRITQVHRILEQKHLDAIIILSDYNRRYLSGFTGTSGALIISKDKQYLITDFRYIDQATKQAPNYEIINRKSTIIGEIKELLHQENFENVGFEGHHVSYDTYLELNKSRISLISISNTVDKIRDVKDADEIALIQKAANIVDETYEYILTVVKAGMTEKELKAILESKMLELGADGPSFDTIVASGHRGALPHGVASDKIIEKGDMITLDFGAYYNGYCSDITRTFAIGEPDPKLKEIYQIVLESQMKAINEIRPGMTGAEADAISRNYLESKGYGKEFGHSLGHGIGLEIHEGPMLARTIQDKLQVNNCVTVEPGVYIEGLGGIRIEDDILITENGCQVFTKCTKDLIVLT

SEQ ID NO: 12581 - protein, 154 aa, Staphylococcus aureus
MNFKEIKELIEILDKSTLTEINIEDTKGKVTLKKEKETEIITPQISQMPVEAAAMPMPQVQSTDSNKTEAPKPTSDNHKTINAPMVGTFYKSPSPDEEAYVQVGDTVSNETTVCILEAMKLFNEIQAEISGEIVEILVEDGQMVEYGQPLFKVK

SEQ ID NO: 12582 - protein, 445 aa, Staphylococcus aureus
MSDYLSVSALTKYIKYKFDQDPHLQSVLIKGELSNFKKHSSGHLYFNVKDKESVISAMMFKGSASKLNFEPKEGDEVLLEARVSVFERRGNYQIYVNKMQLDGIGNLYQKLEALKKKLTEEGCFDKANKKSIPKFPKKIAVLTASTGAAIRDIHSTINSRFPLAEQIQISTLVQGEKAKDDIIEKIEYADSLGVDTIIVGRGGGSIEDLWNFNEEAVVRAIYNCKTPIISAVGHETDFTLSDFAADIRAATPTQAAVIATPDQYELLQQIQQYQFTLTRFIKKHLEQQRKHVEHLSSYYKFKQPTLLYDQQIQRRDDLEKRLKQQIQVTFEQQRHRLILLQQRYNLKALLSSVNQEQQNNLQLTNQLVKLLNSKILSYKNDLKNKVENLNNLSPTNTMLRGYAIVNKKDEVITSTKDLTENDQLTLTMKDGLVDAKVTKVRCNND

SEQ ID NO: 12583 - protein, 293 aa, Staphylococcus aureus
MTNLPMNKLIDEVNNELSVAINKSVMDTQLEESMLYSLNAGGKRIRPVLLLLTLDSLNTEYELGMKSAIALEMIHTYSLIHDDLPAMDNDDYRRGKLTNHKVYGEWTAILAGDALLTKAFELISSDDRLTDEVKIKVLQRLSIASGHVGMVGGQMLDMQSEGQPIDLETLEMIHKTKTGALLTFAVMSAADIANVDDATKEHLESYSYHLGMMFQIKDDLLDCYGDEAKLGKKVGSDLENNKSTYVSLLGKDGAEDKLTYHRDAAVDELMQIDEQFNTKHLLEIVDLFYSRDH

SEQ ID NO: 12584 - protein, 473 aa, Staphylococcus aureus
MSEKQYDLVVLGGGTAGYVAAIRASQLGKKVAIVERQLLGGTCLHKGCIPTKSLLKSAEVFQTVKQAAMFGVDVKDANVNFENMLARKEDIINQMYQGVKHLMQHNHIDIYNGTGRILGTSIFSPQSGTISVEYEDGESDLLPNQFVLIATGSSPAELPFLSFDHDKILSSDDILSLKTLPSSVGIIGGGVIGMEFASLMIDLGVDVTVIEAGERILPTESKQASQLLKKSLSARGVKFYEGIKLSENDINVNEDGVTFEISSDIIKVDKVLLSIGRKPNTSDIGLNNTKIKLSTSGHILTNEFQQTEDKHIYAAGDCIGKLQLAHVGSKEGVVAVDHMFEGNPIPVNYNMMPKCIYSQPEIASIGLNIEQAKAEGMKVKSFKVPFKAIGKAVIDSHDANEGYSEMVIDQSTEEIVGINMIGPHVTELINEASLLQFMNGSALELGLTTHAHPSISEVLMELGLKAESRAIHV

SEQ ID NO: 12585 - protein, 330 aa, Staphylococcus aureus
MIDYKSLGLSEEDLKVIYKWMDLGRKIDERLWLLNRAGKIPFVVSGQGQEATQIGMAYALEEGDITAPYYRDLAFVTYMGISAYDTFLSAFGKKDDVNSGGKQMPSHFSSRAKNILSQSSPVATQIPHAVGAALALKMDGKKKIATATVGEGSSNQGDFHEGLNFAGVHKLPFVCVIINNKYAISVPDSLQYAAEKLSDRALGYGIHGEQVDGNNPLAMYKAMKEARERAISGQGSTLIEAVTSRMTAHSSDDDDQYRTKEEREALKKADCNEKFKKELLSAGIIDDAWLAEIEAEHKDIINKVTKAAEDAPYPSVEEAYAFVYEEGSLN

SEQ ID NO: 12586 - protein, 327 aa, Staphylococcus aureus; identical to SEQ ID NO: 5484

SEQ ID NO: 12587 - protein, 424 aa, Staphylococcus aureus
MEITMPKLGESVHEGTIEQWLVSVGDHIDEYEPLCEVITDKVTAEVPSTISGTITEILVEAGQTVAIDTIICKIETADEKTNETTEEIQAKVDEHTQKSTKKASATVEQTSTAKQNQPRNNGRFSPVVFKLASEHDIDLSQVVGSGFEGRVTKKDLMSVIENGGTTAQSDKQVQTQSTSVATSSNQSSEDNSENSTIPVNGVRKAIAQNMVNSVTEIPHAWMMIEVDATNLVNTRNHYKNNFKNKEGYNLTFFAFFVKAVADALKAYPLLNSSWQGNEIVLHTDINISIAVADENKLYVPVIKHADEKSIKGIAREINTLATKARNKQLTTEDMQGGTFTVNNTGTFGSVSSMGIINHPQAAILQVESIVKKPVVIDDMIAIRSMVNLCISIDHRILDGLQTGKFMNHIKQRIEQYTLENTNIY

SEQ ID NO: 12588 - protein, 149 aa, Staphylococcus aureus
MIELMDMNFDLYMNGVVEQARNEIESAGYEQLTTAEDVDKVLKQDGTTLVMINSVCGCAGGIARPAASHALHYDVLPDRLVTVFAGQDKEATQRAREYFEGYAPSSPSFALVKDGKITEMIERHQIEGHDVMNVINQLQTLFNKYCEER

SEQ ID NO: 12589 - protein, 326 aa, Staphylococcus aureus
MLKLNPYKIGFRTIKTAVGMTLGVIISKLLGLDNYASSAILVVLCIKHTKVHSLQAIISRLVSCFLVLFLGSAIFSLLGQSPIVLGIIVLLFIPLTVVLKVQEGVITSCVILLHVFNAKSIDVHLIVNETLLLLIGLSIAFTMNLMMPSLDKQLDEYKCKIEQQIADIFSKYSYICEKYEDTIAIEFEALLLNIKKAKSIAFRDVKNHFVRNENSYYHYFDMREEQVELLMRMKPLIESICHKDPLLNDVASLLKEIGLNVNSNDYTAMRLHNLYETRLKLDELPLPTTHKALNSRASIIQILNELEEYLQIKSQFGSLKMHSEVA

SEQ ID NO: 12590 - protein, 468 aa, Staphylococcus aureus
MTQQIGVIGLAVMGKNLAWNIESRGYSVSVFNRSSEKTDLMVEESKGKNIHPTYSLEEFVNSLEKPRKILLMVQAGKATDATIDSLLPLLDDGDILIDGGNTNYQDTIRRNKALAQSAINFIGMGVSGGEIGALTGPSLMPGGQEEAYNKVADILDAIAAKAKDGASCVTYIGPNGAGHYVKMVHNGIEYADMQLIAESYAMMKELLGMSHEDIAQTFKDWNAGELESYLIEITGDIFMKLDENKEALVEKILDTAGQKGTGKWTSINALELGIPLTIITESVFARFISSIKEERVNASKELNGPKASFDGDKKDFLEKIRKALYMSKICSYAQGFAQMRKASEDNEWNLKLGDLAMIWREGCIIRAQFLQKIKDAYDNNPGLQNLLLDPYFKNIVTEYQDALRDVVATGVQNGVPTPGFSSSINYYDSYRAADLPANLIQAQRDYFGAHTYERKDKEGVFHTQWIEE

SEQ ID NO: 12591 - protein, 339 aa, Staphylococcus aureus
MVTIKDVALKAGVSPSTVSRVIKGNQRISEATISKVKKVMEELNYFPNTAARTLITNQTYKIGLVLKGSEEPIRLNPFYINVLLGISETCNQHGYGTQTTVSNNMNDLMDEVYKMIKQRMVDAFILLYSKENDPIKQMLIDESMPFIVIGKPTSDIDHQFTHIDNDNILASENLTRHVIEQGVDELIFITEKGNFEVSKDRIQGFETIASQNKINYQIIETSNEREVIFNYMQNLHTRLKDPNIKQAIISLDAMLHLAILSVLYELNIEIPKDVMTATFNDSYLTEIASPPQTSIDIKPRMLGQQAGSAILNILKNKAQDVIELVIIDTELKIRKSTQR

SEQ ID NO: 12592 - protein, 549 aa, Staphylococcus aureus
MNKQWWKEAVAYQVYPRSFNDSNHDGIGDLPGMIDKLDYLKDLGIDVIWLSPMFKSPNDDNGYDISDYQEIMDEFGTMEDFDRLLKGVHDRGMKLILDLVVNHTSDEHPWFIESKSSKDNPKRDWYIWQDPKPDGSEPNNWESIFNGSTWEYDANTEQYYFHLFSKKQPDLNWGNPEVRDAVFEMMNWWFDKGIDGFRVDAITHIKKTFEAGDLPVPEGKTYAPAFDVDMNQPGIQTWLQEMKDRSLSKYDIMTVGEANGVSPDDADDWVGEENGKFNMIFQFEHLGLWNSGDSHFDVNSYKSVLNRWQKQLENKGWNALFIENHDQPRRVSTWGDDDKYWYESATSHAAVYFLQQGTPFIYQGQEIGMTNYPFESIETFNDVAVKNDYQIVKAQGGDVDALLAKYKDENRDNSRTPMQWDDTLNGGFTNGEPWFPVNPNYKTINVALQLEDEHSVLQFYKDLIQLRKSNDVYVYGQFDLVDAENSQVFAYMRTLNEKQVLIVGNLTNHEAELTVPFDVSHGEVKLFNYDAKVNLKQLRPYEACVIELN

SEQ ID NO: 12593 - protein, 415 aa, Staphylococcus aureus
MEHVFYHRHDVSNEESYQELLDFSNELDSQFELKGNRLFYLAMAPQFFGVISDYLKSSGLTDTKGFKRLVIEKPFGSDLKSAEALNNQIRKSFKEEEIYRIDHYLGKDMVQNIEVLRFANAMFEPLWNNKYISNIQVTSSEILGVEDRGGYYESSGALKDMVQNHMLQMVALLAMEAPISLNSEDIRAEKVKVLKSLRHFQSEDVKKNFVRGQYGEGYIDGKQVKAYRDEDRVADDSNTPTFVSGKLTIDNFRWAGVPFYIRTGKRMKSKTIQVVVEFKEVPMNLYYETDKLLDSNLLVINIQPNEGVSLHLNAKKNTQGIETEPVQLSYSMSAQDKMNTVDAYENLLFDCLKGDATNFTHWEELKSTWKFVDAIQDEWNMVDPEFPNYESGTNGPLESDLLLARDGNHWWDDIQ

SEQ ID NO: 12594 - protein, 302 aa, Staphylococcus aureus
MQKNILKSGIALSELGLGCMSLGTDLKKAEQIIDCAVENGITYFDTADMYDKGINESVVGKALLKYQQRDDIVIGTKVGNRLTNDGSTTWDPSKSYIKEAVKGSLKRLGIDHIDLYQLHGGTIDDPLDETISAFDELKQEGIIRAYGISSIRPNVIDYYLKHSQIETIMSQFNLIDNRPESLLDAIHNNDVKVLARGPVSKGLLTSNSVNVLDNKFKDGIFDYSHDELGETIASIKEIESNLSALTFSYLTSHDVLGSIIVGASSVDQLKENIENYHTKVSLDQIKTARARVKDLEYTNHLV

SEQ ID NO: 12595 - protein, 297 aa, Staphylococcus aureus
MVMETIIEEYLRFIQIEKGLSSNTIGAYRRDLKKYQDYMTEHHISHIDFIDRQLIQECLGHLIDQGQSAKSIARFISTIRSFHQFAIREKYAAKDPTVLLDSPKYDKKLPDVLNVDEVLALLETPDLNKINGYRDRTMLELLYATGMRVSELIHLELEHVNLIMGFVRVFGKGDKERIVPLGDTVIEYLTTYIETIRPQLLKKTVTEGLFLNMHGKPLSRQAIWKMIKQNGVKANIKKTLTPHTLRHSFATHLLENGADLRAVQEMLGHSDISTTQLYTHVSKSQIRKMYNQFHPRA

SEQ ID NO: 12596 - protein, 245 aa, Staphylococcus aureus
MTKELERLQKRIANSGYTSRRKAETLISEGKVKVNGTTVTELGTKVKPSDTIEVEGIKIELEDKIYILFHKPTQVITSVSDDRGRTVVTDYFKDIEARIYPVGRLDYDTSGLLLLTNDGEFTNLMTHPRYQIKKKYVAKLKGYLMREEVKALEKGIELEDGMTQPAEVKVKKQDKDKNTTLVEITITEGRNRQVRRMFEHFGHQVTKLSRIEYGPLNVVGLNAGEGRVLTPHEVKVMRHLAEHGK

SEQ ID NO: 12597 - protein, 583 aa, Staphylococcus aureus
MMSRLNSVVIKLWLTIILIVTTVLILLSIALITFMQYYFTQETENAIREDARRISSLVEQSHNKEEAIKYSQTLIENPGGLMIINNKHRQSTASLSNIKKQMLNEVVNNDHFDDVFDKGKSVTRNVTIKEKGSSQTYILLGYPTKAQKNSHSKYSGVFIYKDLKSIEDTNNAITIITIITAVIFLTITTVFAFFLSSRITKPLRRLRDQATRVSEGDYSYKPSVTTKDEIGQLSQAFNQMSTEIEEHVDALSTSKNIRDSLINSMVEGVLGINESRQIILSNKMANDIMDNIDEDAKAFLLRQIEDTFKSKQTEMRDLEMNTRFFVVTTSYIDKIEQGGKSGVVVTVRDMTNEHNLDQMKKDFIANVSHELRTPISLLQGYTESIVDGIVTEPDEIKESLAIVLDESKRLNRLVNELLNVARMDAEGLSVNKEVQPIAALLDKMKIKYRQQADNLGLNMTFNYCKKRVWSYDMDRMDQVLTNLIDNASRYTKPGDEIAITCDENESEDILYIKDTGTGIAPEHLQQVFDRFYKVDAARTRGKQGTGLGLFICKMIIEEHGGSIDVKSELGKGTTFIIKLPKPE

SEQ ID NO: 12598 - protein, 74 aa, Staphylococcus aureus
MDTCIACGACGAAAPDIYDYDDEGIAFVILDDNQGTAEVPEELYEDMEDAIDGCPTDSIKIADETFDGDALKFE

SEQ ID NO: 12599 - protein, 398 aa, Staphylococcus aureus
MYKEANKMTEEFNESMINDIKEGDKVTGEVQQVEDKQVVVHINGGKFNGIIPISQLSTHHIDSPSEVVKEGDEVEAYVTKVEFDEENETGAYILSRRQLETEKSYSYLQEKLDNNEIIEAKVTEVVKGGLVVDVGQRGFVPASLISTDFIEDFSVFDGQTIRIKVEELDPENNRVILSRKAVEQEENDAKKDQLLQSLNEGDVIDGKVARLTQFGAFIDIGGVDGLVHVSELSHEHVQTPEEVVSIGQDVKVKIKSIDRDTERISLSIKDTLPTPFENIKGQFHENDVIEGVVVRLANFGAFVEIAPGVQGLVHISEIAHKHIGTPGEVLEPGQQVNVKILGIDEENERVSLSIKATLPNEDVVESDPSTTKAYLESEEEDNPTIGDMIGDKLKNLKL

SEQ ID NO: 12600 - protein, 436 aa, Staphylococcus aureus
MTKPIVAIVGRPNVGKSTIFNRIVGERVSIVEDTPGVTRDRIYSSGEWLTHDFNIIDTGGIEIGDAPFQTQIRAQAEIAIDEADVIIFMVNVREGLTQSDEMVAQILYKSKKPVVLAVNKVDNMEMRTDVYDFYSLGFGEPYPISGSHGLGLGDLLDAVVSHFGEEEEDPYDEDTIRLSIIGRPNVGKSSLVNAILGEDRVIVSNVAGTTRDAIDTEYSYDGQDYVLIDTAGMRKKGKVYESTEKYSVLRALKAIERSNVVLVVIDAEQGIIEQDKRVAGYAHEQGKAVVIVVNKWDTVEKDSKTMKKFEDEVRKEFQFLDYAQIAFVSAKERTRLRTLFPYINEASENHKKRVQSSTLNEVVTDAISMNPTPTDKGRRLNVFYATQVAIEPPTFVVFVNDVELMHFSYKRYLENQIRAAFGFEGTPIHIIARKRN

SEQ ID NO: 12601 - protein, 90 aa, Staphylococcus aureus; identical to SEQ ID NO: 5313

SEQ ID NO: 12602 - protein, 241 aa, Staphylococcus aureus
MADNKANKEQVHRVFQNISKKYDRLNNIISFEQHKVWRKRVMKDMGVRQGTKALDVCCGTGDWTIALSKAVGPIGEVTGIDFSENMLEVGKEKTASMENVKLVHGDAMELPFEDNSFDYVTIGFGLRNVPDYLVALKEMNRVLKPGGMVVCLETSQPTLPVFKQMYALYFKFVMPIFGKLFAKSKEEYEWLQQSTFNFPGKEELKRMFEEAGFINVRVRSFTGGVAAMHLGYKEKDNTKGD

SEQ ID NO: 12603 - protein, 322 aa, Staphylococcus aureus
MINVAKLNMNNEIKKVEQRLEKAIKSKDSVLEQASLHLLSSGGKRVRPAFVILSSQFGKDEQTSEQTYQVAVALELIHMATLVHDDVIDKSDKRRGKLTISKKWDQTTAILTGNFLLALGLEHLMAVKDNRVHQLISESIVDVCRGELFQFQDQFNSQQTIINYLRRINRKTALLIQLSTEVGAITSQSDKETVRKLKMIGHYIGMSFQIIDDVLDFTSTEKKLGKPVGSDLLNGHITLPILLEMRKNPDFKLKIEQLRRDSERKEFEECIQIIRKSDSIDEAKAVSSKYLSKALDLISELPDGHPKSLLLSLTKKMGSRNT

SEQ ID NO: 12604 - protein, 390 aa, Staphylococcus aureus
MCMRYLTSGESHGPQLTVIVEGVPANLEVKVEDINKEMFKRQGGYGRGRRMQIEKDTVEIVSGVRNGYTLGSPITMVVTNDDFTHWRKIMGAAPISDEERENMKRTITKPRPGHADLVGGMKYNHRDLRNVLERSSARETAARVAVGALCKVLLEQLDIEIYSRVVEIGGIKDKDFYDSETFKANLDRNDVRVIDDGIAQAMRDKIDEAKNDGDSIGGVVQVVVENMPVGVGSYVHYDRKLDGRIAQGVVSINAFKGVSFGEGFKAAEKPGSEIQDEILYNTELGYYRGSNHLGGLEGGMSNGMPIIVNGVMKPIPTLYKPLNSVDINTKEDFKATIERSDSCAVPAASIVCEHVVAFEIAKALLEEFQSNHIEQLKQQIIERRQLNIEF

SEQ ID NO: 12605 - protein, 384 aa, Staphylococcus aureus
MGKRMKIGITCYPSMGGSGIIATELGIKLAERGHEVHFITSNIPFRIRKPLPNMIFHQVEVNQYAVFQYPPYDITLSTKIAEVIKEYDLDLLHMHYAVPHAICGILAREMSGKDIKIMTTLHGTDITVLGYDHSLQGAIKFGIEKSDIVTSVSKSLAQETHEIIETNKEIIPIYNFVRENEFPTKHNTALKAQFGIAPDEKVLIHVSNFRQVKRIDTIIETFAKVREKIPSKLILLGDGPELVPMRQKTKELNVEEDVLFLGKQDCVSEFYQLSDLVLLLSEKESFGLTLLEAMKTGVVPIGSNAGGIKEVIKHGETGFVVDVGDCDSASDYAIRLLEDKVLYNKLQKNMLADIAERFGSELITDQYEYYYQKMLNEHNKSKGE

SEQ ID NO: 12606 - protein, 411 aa, Staphylococcus aureus
MSITKVKASNNMNKSLFEQARPILEQIQDNGFEAYYVGGSVRDYVMGRNIHDIDITTSATPDEIESIFSHTIPVGKEHGTINVVFNDENYEVTTFRAEEDYVDHRRPSGVTFVRDLYEDLQRRDFTMNAIAMDTSYKLYDYFDGQQDINNRIIRTVGIAEERFQEDALRMIRCLRFQSQLSFEIATETFEAMRTQMADIKFLSIERIVIELTKLMRGINVEKSFNHLKSLKAYNYMPYFEHLDMNQINVTEPIDLELLIAIVSVKFDINYSLKPLKLSNRQVKDINQYIQIMNALPSIITKEQLKMFVYDYDTNLIKNVMVAVDVLKANDIQGHEPLIVNLQTIDETLHHLTMHNRKDMMVNGGVLMAHLNAKSGPWLKDVLRQIEIAIVTGKVSNEETEILKWVDNHVKI

SEQ ID NO: 12607 - protein, 130 aa, Staphylococcus aureus
MTYSGLKIKVSNEVEKMSDVSLKLSAKDIYEKDFEKTMARGYRREEVDAFLDDIIADYQKMADMNNEVVKLSEENHKLKKELEELRLRVATSRPQDNKSFSSNNTTTNTSSNNVDILKRISNLEKAVFGK

SEQ ID NO: 12608 - protein, 325 aa, Staphylococcus aureus
MGTFYWRGTNMAEQQTIMERLFHTLDEKAKTLNNENGQSFIENLGLAMEQVYTNERGLLEQSTLQDRRKAFQFAYLSLMQEEKIQANHQITPDSIGLILGFLVERFMNNQEELHIVDIASGAGHLSATVKEVLPEIAVMHHLIEVDPVLSRVSVHLANFLEIPFDVYPQDAIMPLPLEEADIVIGDFPVGYYPIDERSKEFKLGFEEGHSYSHYLLIEQAINALKDAGYAFLVVPSNIFTGEHVKQLEKYIATETEMQAFLNLPPTLFKNEKARKSILILQKKKSGETKPVEVLLANIPDFKNPSQFQGFMTELNQWMDTNRPKK

SEQ ID NO: 12609 - protein, 384 aa, Staphylococcus aureus
MKLFTNERGVLQMLVAVVKELKQGEGRVACTPENVRKLTAAGHKVIVEKNAGIGSGFSNDMYEKEGAKIVTHEQAWEADLVIKVKEPHESEYQYFKKNQIIWGFLHLASSKEIVEKMQEVGVTAISGETIIKNGKAELLAPMSAIAGQRSAIMGAYYSEAQHGGQGTLVTGVHENVDIPGSTYVIFGGGVAATNAANVALGLNAKVIIIELNDDRIKYLEDMYAEKDVTVVKSTPENLAEQIKKADVFISTILIPGAKPPKLVTREMVKSMKKGSVLIDIAIDQGGTIETIRPTTISDPVYEEEGVIHYGVPNQPGAVPRTSTMALAQGNIDYILEICDKGLEQTIKDNEALSTGVNIYQGQVTNQGLATSHDLDYKEILNVIE

SEQ ID NO: 12610 - protein, 5795 aa, Staphylococcus aureus
MNYRDKIQKFSIRKYTVGTFSTVIATLVFLGFNTSQAHAAETNQPASVVKQKQQSNNEQTENRESQAQNSQNSQNGQSLSATRENEQPNISQANLVDQKVAQSSTTNDEQPASQNVNTKKDSATAATTQPDKEEIKHKQNESQSANKNGNDSRAAHVENHEANVVTASDSSDNGNVQHDRNELQAFFDANYHDYRFIDRENADSGTFNYVKGIFDKINTLLGSNDPINNKDLQLAYKELEQAVALIRTMPQRQQTSRRSNRIQTRSVESRAAEPRSVSDYQNANSSYYVENANDGSGYPVGTYINASSKGAPYNLPTTPWNTLKASDSKEIALMTAKQTGDGYQWVIKFNKGHAPHQNMIFWFALPADQVPVGRTDFVTVNSDGTNVQWSHGAGAGANKPLQQMWEYGVNDPDRSHDFKIRNRSGQVIYDWPTVHIYSLEDLSRASDYFSEAGATPATKAFGRQNFEYINGQKPAESPGVPKVYTFIGQGDASYTISFKTQGPTVNKLYYAAGGRALEYNQLFMYSQLYVESTQDHQQRLNGLRQVVNRTYRIGTTKRVEVSQGNVQTKKVLESTNLNIDDFVDDPLSYVKTPSNKVLGFYSTNANTNAFRPGGAQQLNEYQLSQLFTDQKLQEAARTRNPIRLMIGFDYPDAYGNSETLVPVNLTVLPEIQHNIKFFKNDDTQNIAEKPFSKQAGHPVFYVYAGNQGNASVNLGGSVTSIQPLRINLTSNENFTDKDWQITGIPRTLHIENSTNRTNNARERNIELVGNLLPGDYFGTIRFGRKEQLFEIRVKPHTPTITTTAEQLRGTALQKVPVNISGIPLDPSALVYLVAPTNQTTNGGSEADQIPSGYTILATGTPDGVHNTITIQPKDYVVFIPPVGKQIRAVVYYNKVVASNMSNAVTILPDDIPPTINNPVGINAKYYRGDEVNFTMGVSDRHSGLKSTTITTLPSGWTSNLTKSDNKNGSLAITGRVSMNQAFNSDITFKVSATDNVNNTTNDSQSKHVSIHVGKISEDAHPIVLGNTEKVVVVNPTAVSNDEKQRIITAFMNKNQNIRGYLASTDPVTVDNNGNVTLHYRDGSSTTLDATNVMTYEPVVKSEYQTANAAKTATVTIAKGQSFNIGDIKQYFTLSNGQAIPSGTFTNITSDRTIPTAQEVSQMNAGTQLYHIVASNAYHKDTEDFYISLKIVDVKQPEGDQRVYRTSTYDLTTDEISKVKQAFINANRDVITLAEGDISVTNTPNGANVSTITVNINKGRLTKSFASNLANMNFLRWVNFPQDYTVTWTNVKIANRPTDGGLSWSDDHKSLIYRYDATLGTQITTNDILTMLKATTTVPGLRNNITGNEKAQAEAGGRPNYRTTGYSQANASSDGQRQYTLNGQVIQILDIINPSNGYGGQPVTNSNTRANHSNATVVNVNEPAANGAGAFTIDHVVKSNSTHNASDAVYKAQLYLTPYGPKQYVEHLNQNTGNTTDAINIYFVPSDLVNPTISVGNYTNHQVFSGETFTNTITANDNFGVQSVTVPTTSQITGTVDNNHQHVSATAPNVTSATSKTINLLATDTSGNTATTSFNVTVKPLRDKYRVGTSSTAANPVRIANISNDATVSQADQTAIINSLMFTETVPNRNYATASANEITSKTVSNVSRTGNNANVTVTVTYQDGTTSTVTVPVKHVIPEIVAHSHYTVQGQDFPAGNGSSAADYFKLSNGSAIPDATITWVSGQAPNKDNTRIGEDINVTANILIDGETTPITKTATYKVVSSVPKHVFETNRGAVFPGVSDVYDAKQYVKPVNDSWTQNAQRMNFQFTNSYGPSKDVVGISTRDIRVTYDNHQTQIIKILAKVKPDPPRIDGNSVTYKAGLTNQQIKINNVLSSSSIKLFKADNTPLTITNTTYGSGNTAVVTVSDALPNGVIKARSSITMNNVTYTTQDEHGRAIDVTRNESVDSNDSATVTVTPQLQATTEGAVFIKGGDGFDFGHVERFIQNPPHGATVAWHDNPDTWKNTVGNTHKTAVVTLPSGQGTRNVEVPVKVYPVANAKAPSRDVKGQNLTNGTDAINYITFDPNTNTNGITAAWANRQQPNNQQAGVQHLNVDVTYPGITAAKRVPVTVNVYQFEFPQTSYTTTVGGTLANGTQASGYAHMQNANGLPTDGFTYKWNNAATGTNDANWAAMNKPNAAKVVNAKYDVIYNGHTFATSLPAKFVVKDVQPAKPTVTETAAGAITITPGANQTVNTHAGNVTTYADKLVIKRNGNVVTIFTRRNNTSPWVKEASAATVAGIAGTNNGITVTAGTFNPADTIQVVATQGSGETISDEQRSDDFTVVAPQPNHANTKIWQNGHIDITPNNPSGHLINPTQAMDIAYTEKMGNGAEHSKTINVVRGQNNQWTIANKPDYVTLDAHTGKVTFNANTVKPNSAITITPKAGTGHSASSNPSTLTAPATHTVNTTEIVKDYGSNVTAAEINNAVQVANKRTATIKNGTAMPTNLAGGSTTTIPVTVTYNDGSTEEVQESIFTKADKRELITAKNHLDDPVSTDGKKPGTITQYNNAIHNAQQQINTAKTEAQQVINNERATPQQVSDALTKVRAAQTKINEAKALLQNKEDNSQLVTSKNNLQSSVNQVPSTTGMTQQSIDNYNAKKREAETEITAAQRVIDNGDATAQQISDENTTAQRNDLTNQISQATNLAAVESVKQSANSLDGAMGNLQTAINDKSGTLASQNFLDADEQKRNAYNQAVSNAETILNKQTGPNTAKTAVEQALNNVNSAKHALNGTQNLNNAKQAAITAINGASDLNQKQKDALKAQANGAQRVSNAQDVQRNATELNTAMGTLKHAIADKTNTLASSKYVNADSTKQNAYTTKVTNAEHIISGTPTVVTTPSEVTAAANQVNSAKQELNGDERLRVAKQNANTAIDALTQLNTPQKAKLKEQVGQANRLEDIQTVQTNGQALNNAMKGLRDSIANETTVKASQNYTDASPNNQSTYNSAVSNAKGIINQTNNPTMDTSAITQATTQVNNAKNGLNGAENLRNAQNTAKQNLNTLSHLTNNQKSAISSQIDRAGHVSEVTAAKNAATELNTQMGNLEQAIHDQNTVKQGVNFTDADKAKRDAYTNAVSRAETILNKTQGANTSKQDVEAAIQNVTSAKNALNGDQNVTNAKNTAKHALNNLTSINNAQKRDLTTKIDQATTVAGVEAVSNTGTQLNTAMANLQNGINDKANTLASENYHDADSDKKTAYTQAVTNAENILNKNSGSNLDKAAVENALSQVTNAKGALNGNHNLEQAKSNANTTINGLQHLTTAQKDKLKQQVQQAQNVAGVDTVKSSANTLNGAMGTLRNSIQDNTATNNGQNYLDATESNKTNYNNAVDSANGVINATSNPNMDANAINQIATQVTSTKNALDGTHNLTQAKQTATNAIDGATNLNKAQKDALKAQVTSAQRVANVTSIQQTANELNTAMGQLQHGIDDENATKQTQKYRDAEQSKKTAYDQAVAAAKAILNKQTGSNSDKAAVDRALQQVTSTKDALNGDAKLAEAKAAAKQNLGTLNHITNAQRTALEGQINQATTVDGVNTVKTNANTLDGAMNSLQGSINDKDATLRNQNYLDADESKRNAYTQAVTAAEGILNKQTGGNTSKADVDNALNTVTRAKAALNGAENLRNTKTSATNTINGLPNLTQLQKDNLKHQVEQAQNVAGVNGVKDKGNTLNTAMGALRTSIQNDNTTKTSQNYLDASDSNKNNYNTAVNNANGVINVTNNPNMDANAINGMANQVNTTKAALNGAQNLAQAKTTAKNNLNNLTSINNAQKDALTRSIDGATTVAGVNQETAKATELNNAMHSLQNGINDETQTKQTQKYLDAGPSKKSAYDQAVNAAKAILTKASGQNVDKAAVEQALQNVNSTKTALNGDAKLNEAKAAAKQTLGTLTHINNAQRTALDNEITQATNVEGVNTVKAKAQQLDGAMGQLETSIRDKDTTLQSQNYQDADDAKRTAYSQAVNAAATILNKTAGGNTPKADVERAMQAVTQANTALNGIQNLERAKQAANTAITNASDLNTKQKEALKAQVTSAGRVSAANGVEHTATELNTAMTALKHAIADKAETKASGNYVNADANKRQAYDEKVTAAENIVSGTPTPTLTPSDVTNAATQVTNAKTQLNGNHNLEVAKQNANTAIDGLTSLNGPQKAKLKEQVGQATTLPNVQTVRDNAQTLNTAMKGLRDSIANEATIKADQNYTDASQNKQTDYNNAVTAAKAIIGQTTSPTMNAQEINQAKDQVTAKQQALNGQENLRTAQTNAKQHLNGLSDLTNAQKDAAKRQIEGATHVNEVTQAQNNADVLNTAMTNLKNGIQDQNTIKQGVNFTDADEAKRNAYTNAVTQAEQILNKAQGPNTAKDNVETALQNVQRAKSELNGNQNVANAKTTAKNTLNNLTSINNAQKAALKSQIEGATTVAGVNQVSAKATELNTAMSNLQSGINDEAATKAAQKYTDADREKQTAYNDAVTAAKTLLDKTAGSNDNKAAVEQALQRVNTAKTALNGDARLNEAKNTAKQQLATMSHLTNAQKANLTSQIERGTTVAGVQGIQANAGTLDQAMNQLRQSIASKDATKSSEDYQDANADLQNAYNHAVSDAEGIISATNNPEMNPDTINQKASQVNSAKSALNGDEKLAAAKQSAKTDIGHLSDLNNAQQTSATAEVDNAPNLAAVTSAKNKATSLNTAMGNLKHALAEKDNTKRSVNYTDADQPKQQAYDTAVTQAEAITNANGSNANETQVQAALNQLNQAKNDLNGDNKVAQAKEAAKRALASYSNLNNAQSTAATSQIDNATTVAGVTAAQNTANELNTAMGQLQNGINDQNTVKQQVNFTDADQGKKDAYTNAVTNAQGILDKAHGQNMTKAQVEAALNQVTTAKNALNGDANVRQAKSDAKANLGTLTHLNNAQKQDLTSQIEGATTVNGVNGVKTKAQDLDGAMQRLESAIANKDQTKASENYIDAYPTKKTAFDNAITQAESYLNKDHGANKDKQAVEQAIQSVTTAKNALNGDANLQRAKTEATQAIDNLTHLNTPQKTALKQQVNAAQRVSGVTDLKNSATSLNNAMDQLKQAIADHDTIVAGGNYTNASPDKQGAYTDAYNAAKNIVNGSPNVITNAADVTAATQRVNNAETGLNGDTNLATAKQQAKDALRQMTHLSDAQKQSITGQIDSATQVTGVQSVKDNATNLDNAMNQLRNSIANKDEVKASQPYVDADTDKQNAYNTAVTSAENIINATSQPTLDPSAVTQAANQVNTNKTALNGAQNLANKKQETTANINQLSHLNNAQNQDLNTQVTNAPNISTVNQVKTKAEQLDQAMERLINGIQDKDQVKQSVNFTDADPEKQTAYNNAVTAAENIINQANGTNANQSQVEAALSTVTTTKQALNGDRKVTDAKNNANQTLSTLDNLNNAQKGAVTENINQAHTVAEVTQAIQTAQELNTAMGNLKNSLNDKDTTLGSQNFADADPEKKNAYNEAVRNAENILNKSTGTNVPKDQVEAAMNQVNTTKAALNGTQNLEKAKQHANTAIDGLSHLTNAQKDALKQLVQQSTTVAEAQGNEQKANNVDAAMDKLRQSIADNATTKQNQNYTDASPNKKDAYNNAVTTAQGIIDQTTSPTLDPNVINQAAGQVNTTKNALNGNENLEAAKQQATQSLGSLDNLNNAQKQAVTNQINGAHTVDEANQIKQNAQNLNTAMGNLKQAIADKDATKATVNFTDADQAKQQAYNTAVTNAENIISKANGGNATQSEVEQAIQQVNATKHRKMH

SEQ ID NO: 12611 - protein, 3158 aa, Staphylococcus aureus
MTQLKQGIADKEQTKADGNFVNADPDKQNAYNQAVAKAEALITGTPDVVVTPSEITAALNKVTQAKNDLNGNTNLATAKQNVQHAIDQLPNLNQAQRDEYSKQITQATLVPNVNAIQQAATTLNDAMTQLKQGIANKAQIKGSENYHDADTDKQTAYDNAVTKAEELLKQTTNPTMDPNTIQQALTKVNDTNQALNGNQKLADAKQAAKTNLGTLDHLNDAQKQALTTQVEQAPDIATVNNVKQNAQNLNNAMTNLNNALHDKTETLNSINFTDADQAKKDAYTNAVAHAEGILSKANGSNASQTEVEQAMQRVNEAKQALNGNDNVQRAKDAAKQVITNANDLNQAQKDALKQQVDAAQTVANVNTIKQTAQDLNQAMTQLKQGIADKDQTKANGNFVNADTDKQNAYNNAVAHAEQIISGTPNANVDPQQVAQALQQVTQAKGDLNGNHNLQVAKDNANTAIDQLPNLNQPQKTALKDQVSHAELVTGVNAIKQNADALNNAMGTLKQQIQANSQVPQSVDFTQADQDKQQAYNNAANQAQQIANGTPTPVLTPDTVTQAVTTMNQAKDALNGDEKLAQAKQDALANLDTLRDLNQPQRDALRNQINQAQALATVEQTKQNSQNVNTAMGNLKQGIANKDTVKASENYHDADADKQTAYTNAVSQAEGIINQTTNPTLNPDEITRALTQVTDAKNGLNGEAKLATEKQNAKDAVNAMTHLNDAQKQALKGQIDQSPEIATVTQVKQTATSLDQAMNQLSQAINDKTQTLTDGNYLNADPDKQNAYKQAVEKAEALLNKQSGTNEVQAQVESITNEVNAAKQALNGNDNLANAKQQPKQQLANLTHLNDAQKQSFESQITQAPLVTDVTTINQKAQALDHAMELLRNSIADNQATLASEDYHDATAQRQNDYNQAVTAAKNIINQTTSPTMNPDEVNRATTQVNNTKVALDGDENLAAAKQQANNRLNQLDHLNNAQKQQLQSQIAQSSDIAAVNGHKQTAESLNTAMGNLINAIADHQAVEQRGNFINADTDKQTAYTTAVNEAEAMINKQTGQNANQPEVEQAITKVQTTLQALNGDHNLQVAKTNATQAIDALTSLNDPQKTALKDQVTAATLVTAVHQIEQNANTLNQAMHGLRESIQDNAATKANSKYINEDQPEQQNYDQAVQAANSIINEQTATLDNNAINQAATTVNTTKAALHGDVKLQNDKDHAKQTVSQLAYLNNAQKHMEDTLIDSETTRIAVKQDLTEAQALDQLMNTLQQSIADKDATRASSAYVNAEPNKKQAYDEAVQNAESIIAGLNNPTINKGNVSSATQAVTTSKNGLDGVERLAQDKQTAGNSLNHLDQLTPAQQQALENQINNATTRDKVAEIIAQAQALNEAMKALKESIKDQPQTEASSKFINEDQAQKDAYTQAVQHAKDLINKTTDPTLVKSVIDQATQAVNDAKNNLHGDQKLAQDKQRATETLNNLSNLNTPQRQALENQINNAATRGEVAQKLTEAQALNQAMEALRNSIQDQQQTEAGSKFINEDKPQKDAYQAAVQHAKDLINQTSNPTLDKAQVEQLTQGVNQAKDNLHGDQKLADDKQHAVTDLNQLNSLNNPQRQALESQINNAATRDEVAQKLAEAQALDQAMQALRNSIQDQQQTESGSKFINEDKPQKDAYQAAVQHAKDLINQTGNPTLDKSQVEQLTQAVTTAKDNLHGDQKLARDQQQAVTTVNALPNLNHAQQQALTDAINAAPTRTEVAQHVQTATELDHAMETLKNKVDQVNTDKAQPNYTEASTDKKEAVDQALQAAESITDPTNGSNANKDAVEQALTKLQEKVNELNGNERVAEAKAQAKQTIDQLAHLNADQIATAKQNIDQATKLQPIAELVDQATQLNQSMDQLQQAVNEHANVEQTVDYTQADSDKQNAYKQAIAEAENVLKQNSNKQQVDQALQNILNAKQALNGDERVALAKTNGKHDIDQLNALNNAQQDGFKGRIDQSHDLNQIQQIVDEAKALNRAMDQLSQEISGNEGRTKGSTNYVNADTQVKQVYDEAVDKAKQALDKSTGQNLTAEQVIKLNDAVTAAKKALNGEERLNNRKSEALQRLDQLTHLNNAQRQLAIQQINNAETLNKASRAINRATKLDNAMGAVQQYIDEQHLGVISSTNYINADDNLKANYDNAIANAAHELDKVQGNAIAKAEAEQLKQNIIDAQNALNGDQNLANAKDKANAFVNSLNGLNQQQQDLAHNAINNADTVSDVTDIVNNQIDLNDAMETLKHLVDNEIPNAEQTVNYQNADDNAKTNFDDAKRLANTLLNSDNTNVNDINGAIQAVKDAIQNLNGEQRLQEAKDKAIQNVNKVLADKLKEIEASNATDQDKLIAKNKAEELANSIINNINKATSNQDVSQVQTAGNQAIEQVHANEIPKAKIDANKDVDKQVQALIDEIGRNPNLTDKEKQALKDRINQILQQGHNDINNALTKEAIEQAKERLAQALQDIKDLVKAKEDAKNKIKALANAKRDQINSNPDLTPEQKAKALKEIDEAEKRALQNVENAQTIDQLNRGLNLGLDDIRNTHVWEVDDQPAVNEISEATPEQLLVNGELIVHRDDIITEQDVLAHINLIDQLTAEVIDTPSTATISDSLTAKVEVTLLDGSKVIVNVPVKVVEKELSVVKQQAIESIENAVQQKINEINNSVTLTLEQKEAAIAEVNKLKQQAIDHINNAPDVHSVEEIQQQEQAHIEQFNPEQFTIEQAKSNAIKSIEDAIQHMIDEIKARTDLTDKEKQEAIAKLNQLKEQAIQLIQRAQSIDEITEQLEQFKAQMKAANPTAKELAKRKQEAISKIKDFSNEKMNSIRNSEIGTADEKQAAMNQINEIVLETIRDINNAHTLQQVEAALNNGIARISAVQIVTSDRAKQSSSTGNESNSHLTIGYGTANHPFNSSTIGHKKKLDEDDDIDPLHMRHFSNNFGNVIKNAIGVVGISGLLASFWFFIAKRRRKEDEEEELEIRDNNKDSIKETLDDTKHLPLLFAKRRRKEDEEDVTVEEKDSLNTGESLDKVKHTPFFLPKRRRKEDEEDVEVTNENTDEKVLKDNEHSPLLIAKRRKDKEEDVETTTSIESKDEDVPLLLAKKKNQKDNQSEDKKSASKNTSKKVAAKKKKKKSKKNKK

SEQ ID NO: 12612 - protein, 159 aa, Staphylococcus aureus; identical to SEQ ID NO: 5421

SEQ ID NO: 12613 - protein, 172 aa, Staphylococcus aureus
MTYMIRLGKMSDLDQILNLVEEAKELMKEHDNEQWDDQYPLLEHFEEDIAKDYLYVLEENDKIYGFIVVDQDQAEWYDDIDWPVNREGAFVIHRLTGSKEYKGAATELFNYVIDVVKARGAEVILTDTFALNKPAQGLFAKFGFHKVGEQLMEYPPYDKGEPFYAYYKNLKE

SEQ ID NO: 12614 - protein, 356 aa, Staphylococcus aureus
MTKIAFTGGGTVGHVSVNLSLIPTALSQGYEALYIGSKNGIEREMIESQLPEIKYYPISSGKLRRYISLENAKDVFKVLKGILDARKVLKKEKPDLLFSKGGFVSVPVVIAAKSLNIPTIIHESDLTPGLANKIALKFAKKIYTTFEETLNYLPKEKADFIGATIREDLKNGNAHNGYQLTGFNENKKVLLVMGGSLGSKKLNSIIRENLDALLQQYQVIHLTGKGLKDAQVKKSGYIQYEFVKEDLTDLLAITDTVISRAGSNAIYEFLTLRIPMLLVPLGLDQSRGDQIDNANHFADKGYAKAIDEEQLTAQILLQELNEMEQERTRIINNMKSYEQSYTKEALFDKMIKDALN

SEQ ID NO: 12615 - protein, 932 aa, Staphylococcus aureus
MTNERKEVSEAPVNFGANLGLMLDLYDDFLQDPSSVPEDLQVLFSTIKNDDSIVPALKSTSSQNSDGTIKRVMRLIDNIRQYGHLKADIYPVNPPKRKHVPKLEIEDFDLDQQTLEGISAGIVSDHFADIYDNAYEAILRMEKRYKGPIAFEYTHINNNTERGWLKRRIETPYKVTLNNNEKRALFKQLAYVEGFEKYLHKNFVGAKRFSIEGVDALVPMLQRTITIAAKEGIKNIQIGMAHRGRLNVLTHVLEKPYEMMISEFMHTDPMKFLPEDGSLQLTAGWTGDVKYHLGGIKTTDSYGTMQRIALANNPSHLEIVAPVVEGRTRAAQDDTQRAGAPTTDHHKAMPIIIHGDAAYPGQGINFETMNLGNLKGYSTGGSLHIITNNRIGFTTEPIDARSTTYSTDVAKGYDVPIFHVNADDVEATIEAIDIAMEFRKEFHKDVVIDLVGYRRFGHNEMDEPSITNPVPYQNIRKHDSVEYVFGKKLVNEGVISEDEMHSFIEQVQKELREAHDKINKADKMDNPDMEKPAELALPLQADEQSFTFDHLKEINDALLTYPDGFNILKKLNKVLEKRHEPFNKEDGLVDWAQAEQLAFATILQDGTPIRLTGQDSERGTFSHRHAVLHDEQTGETYTPLHHVPDQKATFDIHNSPLSEAAVVGFEYGYNVENKKSFNIWEAQYGDFANMSQMIFDNFLFSSRSKWGERSGLTLFLPHAYEGQGPEHSSARLERFLQLAAENNCTVVNLSSSSNYFHLLRAQAASLDSEQMRPLVVMSPKSLLRNKTVAKPIDEFTSGGFEPILTESYQADKVTKVILATGKMFIDLKEALAKNPDESVLLVAIERLYPFPEEEIEALLAQLPNLEEVSWVQEEPKNQGAWLYVYPYVKVLVADKYDLSYHGRIQRAAPAEGDGEIHKLVQNKIIENALKNN

SEQ ID NO: 12616 - protein, 628 aa, Staphylococcus aureus
MSDRFIKFNDEQLDAKQVMMLQDLARLLLKNEQTQVKIQKFPYYNPVQNVLITSWFWSHRPSHIEMAGLKTDVMLAAYGYHMMDVQIVNEVVQDKTFKHPKFYQQLFKLLEDMRVLNSIKIERPSTAKLIDLRLDTRISYTESQIKVYRTKTQYTDLLFLYLEHAFLSQDFFDIPSIHSDLDDILVNMFLYLPNFFQNQNSEDNMYLAQRIMYQVDDILKEDMLNEYYYLPKTLYNTLASPEFEDLKRTDASQVDGEDDTSEDDNNESEKADSKSADSESKGGAYLEMELHEGQNSETLGNDEAREGDATDDMTDMMTKKGKGSNDTLNREEGDAVGQSQAFQLDGVNKNVEIKWQIPEIEPQYVLEYQESKQDVQYEIKDLIQIIKKTIEREQRDARFNLTKGRLQKDLINWFIDDQYKLFYKKQDLSKSFDATFTLLIDASASMHDKMAETKKGVVLFHETLKALNIKHEILSFSEDAFDSDDHAQPNIINEIINYDYSTFEKDGPRIMALEPQDDNRDGVAIRVASERLMRRNQHQRFLIVFSDGEPSAFNYSQDGIIDTYEAVEMSRKFGIEVFNVFLSQDPITEDVEQTIHNIYGQYAIFVEGVAHLPGHLSPLLKKLLLKSL

SEQ ID NO: 12617 - protein, 1065 aa, Staphylococcus aureus
MVAYLNIHTAYDLLNSSLKIEDAVRLAVSENVEALAITDTNVLYGFPKFYDACIANNIKPIFGMTIYVTNGLNTIETVVLAKDNNGLKDLYQLSSKIKMNSMENVSFELLQQFSSNLIIIFKNVADEHRDIVQVFDSHEDTYLDHRSVLVQGVKHVWIQNVCYQTCQDADTISALAAIRDNTKLDLIHDQEDFGAHFLTEKEIKQLEINQEYLTQVDVIAQKCNAELKYHQSLLPQYQTPNDESAKKYLWRVLVTQLKKLELNYDVYLERLKYEYKVITNMGFEDYFLIVSDLIHYAKTNDVMVGPGRGSSAGSLVSYLLGITTIDPIKFNLLFERFLNPERVTMPDIDIDFEDTRRERVIQYVQEKYGELHVSGIVTFGHLLARAVARDVGRIMGFDEVTLNEISSLIPHKLGITLDEAYQIDDFKKFVHRNHRHERWFSICKKLEGLPRHTSTHAAGIIINDHPLYEYAPLTKGDTGLLTQWTMTEAERIGLLKIDFLGLRNLSIIHQILTQVKKDLGINIDIEKIPFDDQKVFDLLSQGDTTGIFQLESDGVRSVLKKLKPEHFEDIVAVTSLYRPGPMEEIPTYITRRHDPSKVQYLHPHLEPILKNTYGVIIYQEQIMQIASAFANFSYGEADILRRAMSKKNRAVLESERQHFIEGAKQNGYHEDISKQIFDLILKFADYGFPRAHAVSYSKIAYIMSFLKVHYPNYFYANILSNVIGSEKKTAQMIEEAKKQGITILPPNINESHWFYKPSQEGIYLSIGTIKGVGYQSVKVIVDERYQNGKFKDFFDFARRIPKRVKTRKLLEALILVGAFDAFGKTRSTLLQAIDQVLDGDLNIEQDGFLFDILTPKQMYEDKEELPDALISQYEKEYLGFYVSQHPVDKKFVAKQYLTIFKLSNAQNNKPILVQFDKVKQIRTKNGQNMAFVTLNDGIETLDGVIFPNQFKKYEALLSHNDLFIVSGKFDHRKQQRQLIINEIQTLATFEEQKLAFAKQIIIRNKSHIDMFEEMIKATKENANDVVLSFYDETIKQMTTLGYINQKDSMFNNFIQSFNPSDIRLI

SEQ ID NO: 12618 - protein, 285 aa, Staphylococcus aureus
MFKDFFNRTKKKKYLTVQDSKNNDVPAGIMTKCPKCKKIMYTKELAENLNVCFNCDHHIALTAYKRIEAISDEGSFTEFDKGMTSANPLDFPSYIEKIEKDQQKTGLKEAVVTGTAQLDGMKFGVAVMDSRFRMGSMGSVIGEKICRIIDYCTENRLPFILFSASGGARMQEGIISLMQMGKTSVSLKRHSDAGLLYISYLTHPTTGGVSASFASVGDINLSEPKALIGFAGRRVIEQTINEKLPDDFQTAEFLLEHGQLDKVVHRNDMRQTLSEILKIHQEVTK

SEQ ID NO: 12619 - protein, 322 aa, Staphylococcus aureus; identical to SEQ ID NO: 5425

SEQ ID NO: 12620 - protein, 585 aa, Staphylococcus aureus; identical to SEQ ID NO: 5426

SEQ ID NO: 12621 - protein, 373 aa, Staphylococcus aureus
MAELQRGLEGVIAAETKISSIIESQLTYAGYDIDDLAENAQFEEVIFLLWNYRLPNEEELAHLKGKLNQYMTLNPRVYTHFEEYVTDHVHPMTALRTSLSYIAHFDPDAENESDENRYERAMRIQAKVASLVTAFARVRQDKEPLKPNPDLSYAANFLYMLRGELPTDIEVEAFNKALILHADHELNASAFTARCAVSSLSDMYSGIVAAVGSLKGPLHGGANEQVMTMLSEIGSIENVDAYLDEKFANKDKVMGFGHRVYKDGDPRAKYLREMSRQITKDAGREELFEMSVKMEKRMAEEKGLIPNVDFYSASVYHCMEIPHDLFTPIFAVSRSAGWIAHILEQYKDNRIMRPRAKYIGETNRKYIPLEERK

SEQ ID NO: 12622 - protein, 422 aa, Staphylococcus aureus
MTAEKITQGTEGLNVPNEPIIPFIIGDGIGPDIWKAASRVIDAAVEKAYNGEKRIEWKEVLAGQKAFDTTGEWLPQETLDTIKEYLIAVKGPLTTPIGGGIRSLNVALRQELDLFTCLRPVRWFKGVPSPVKRPQDVDMVIFRENTEDIYAGIEFKEGTTEVKKVIDFLQNEMGATNIRFPETSGIGIKPVSKEGTERLVRAAIQYAIDNNRKSVTLVHKGNIMKFTEGSFKQWGYDLALTEFGDQVFTWQQYDEIVENEGRDAANAAQEKAEKEGKIIIKDSIADIFLQQILTRPAEHDVVATMNLNGDYISDALAAQVGGIGIAPGANINYETGHAIFEATHGTAPKYAGLNKVNPSSVILSSVLMLEHLGWQEAADKITDSIEDTIASKVVTYDFARLMDGAEEVSTSAFADELIKNLK

SEQ ID NO: 12623 - protein, 876 aa, Staphylococcus aureus
MNKLVLIDGNSLSFRAFYALPLLSNKAGIHTNAVYGFAMLLEKILKEEKPNHFLVAFDAGKTTFRHEKYSEYKGGRQKTPPELSEQFPYIRQLLDAYHIKRYELDNYEADDIIGTLSKEADKAGFQTIIITGDRDLTQLATDNVTIYYTKKGVTDVDHYTPDFIAEKYNGLTPNQIIDMKGLMGDTSDNIPGVAGVGEKTAIKLLNQFDTVEGVYEHLDEISGKKLKEKLQNSKEDALMSKELATINVDSPIEVKLEDTLMTHQDEQQEKIELFKKLEFKQLLADIDQSASVEDAIEKTFEIETSFDNVDFTSLKEAVIHFELDGGNYLRNNILKFSLFTGEKHIVINADDINNYAELVSWLENPNTKKVVYDAKKTYVASHRLGIDIQNISFDIMLASYIIDPSRTISDVQSVVSLYGQSFVKDDVSIYGKGKKFKVPEDDVLIPYVASITDAIYFAKPNMDKQLEEYNQVELLADLELPLAKILSEMEEIGIFTDVHDLEEMEKEIQEKLDVLIRNIHDVAGEDFNINSPKQLGVVLFETLQLPVIKKTKTGYSTAVDVLEQLQGEHPIIDYILEYRQLSKLQSTYVEGLQKVISDDQRIHTRFNQTLAQTGRLSSVDPNLQNIPVRLEEGRKIRKAFKPTSKDSVILSADYSQIELRVLAHITQDESMKEAFINGDDIHTATAMKVFGVEADQVDSLMRRQAKAVNFGIVYGISDYGLSQSLGITRKKAKAFIDDYLASFPGVKQYMSDIVKDAKALGYVETLLHRRRYIPDITSRNFNLRGFAERTAMNTPIQGSAADIIKLAMVKFAQKMKETTYQAKLLLQVHDELIFEVPKSEVDSFSEFVEEIMENALQLDVPLKVDSSYGATWYDAK

SEQ ID NO: 12624 - protein, 344 aa, Staphylococcus aureus
MLLMSTNIAINGMGRIGRMVLRIALQNKNLNVVAINASYPPETIAHLINYDTTHGKYNLKVEPIENGLQVGDHKIKLVADRNPENLPWKELDIDIAIDATGKFNHGDKAIAHIKAGAKKVLLTGPSKGGHVQMVVKGVNDDQLDIEAFDIFSNASCTTNCIGPVAKVLNNQFGIVNGLMTTVHAITNDQKNIDNPHKDLRRARSCNESIIPTSTGAAKALKEVLPELEGKLHGMALRVPTKNVSLVDLVVDLEKEVTVEEVNQAFENTGLEGIIEVEHQPLVSVDFNTNPHSAIIDAKSTMVMSGNKVKVIAWYDNEWGYSNRVVDVAEQIGALLTSKETVSAS

SEQ ID NO: 12625 - protein, 645 aa, Staphylococcus aureus
MEQINIQFPDGNKKAFDKGTTTEDIAQSISPGLRKKAVAGKFNGQLVDLTKPLETDGSIEIVTPGSEEALEVLRHSTAHLMAHAIKRLYGNVKFGVGPVIEGGFYYDFDIDQNISSDDFEQIEKTMKQIVNENMKIERKVVSRDEAKELFSNDEYKLELIDAIPEDENVTLYSQGDFTDLCRGVHVPSTAKIKEFKLLSTAGAYWRGDSNNKMLQRIYGTAFFDKKELKAHLQMLEERKERDHRKIGKELELFTNSQLVGAGLPLWLPNGATIRREIERYIVDKEVSMGYDHVYTPVLANVDLYKTSGHWDHYQEDMFPPMQLDETESMVLRPMNCPHHMMIYANKPHSYRELPIRIAELGTMHRYEASGAVSGLQRVRGMTLNDSHIFVRPDQIKEEFKRVVNMIIDVYKDFGFEDYSFRLSYRDPEDKEKYFDDDDMWNKAENMLKEAADELGLSYEEAIGEAAFYGPKLDVQVKTAMGKEETLSTAQLDFLLPERFDLTYIGQDGEHHRPVVIHRGVVSTMERFVAFLTEETKGAFPTWLAPKQVQIIPVNVDLHYDYARQLQDELKSQGVRVSIDERNEKMGYKIREAQMQKIPYQIVVGDKEVENNQVNVRQYGSQDQETVEKDEFIWNLVDEIRLKKHR

SEQ ID NO: 12626 - protein, 497 aa, Staphylococcus aureus
MSKVQNESNNVVKRGLKDRHISMIAIGGCIGTGLFVTSGGAIHDAGALGALIGYAIIGIMVFFLMTSLGEMATYLPVSGSFSTYATRFVDPSLGFALGWNYWFNWVVTVAADITIAAQVIQYWTPLQGIPAWAWSALFLVIIFSLNSLSVRVYGESEYWLALIKVVTVIVFIAIGLLTIVGIMGGHFVGFEIFNKGEGPILGGNLGGSLLSILGVFLIAGFSFQGTELIGITAGESENPERAVPKAIKQVFWRIVLFYILAIFVIGMLIPYDSSALMGGGNDVATSPLTLVFKNAGFAFAASFMNAVILTSVLSAGNSGMYASTRMLYSMSKDKLAFETFGKTNKNGVPYMSLLVTAIIVVIIFVVQSVTEGAYQYIVAASGLTGFIAWVGIAVSHYRFRRAFDKQNYDKSKLKYTAKLFPFGPIFAAILCIVVIIGQDVDFIKTGDFNFSRFLITYMGIPVFLAFFIYHKLRYKTKKIPLEQVDLRQDVSMDEIKG

SEQ ID NO: 12627 - protein, 200 aa, Staphylococcus aureus
MYKEERVFYTCSSFLLGANFVKILEVSTIAKDQTQINDKIRAKELRLIGQDGEQIGVKSKREALEMAERVDLDLVVVAPNAKPPVARIMDYGKFKFEQQKKEKEMKKKQKIINVKEIRLSPTIEEHDFQTKLKNGRKFLTKGDKCKVSIRFRGRAITHKEIGQRVLEKYADECKDIATVEQKPKMDGRQMFIMLAPTAEK

SEQ ID NO: 12628 - protein, 66 aa, Staphylococcus aureus; identical to SEQ ID NO: 5732

SEQ ID NO: 12629 - protein, 568 aa, Staphylococcus aureus; identical to SEQ ID NO: 5492

SEQ ID NO: 12630 - protein, 118 aa, Staphylococcus aureus
MPRVKGGTVTRARRKKTIKLAKGYFGSKHTLYKVAKQQVMKSGQYAFRDRRQRKRDFRKLWITRINAAARQHEMSYSRLMNGLKKAGIDINRKMLSEIAISDEKAFAQLVTKAKDALK

SEQ ID NO: 12631 - protein, 172 aa, Staphylococcus aureus
MGAEGQNKSDALSQYEVKRKNDMEEDPSYKQLISYCLLENEHGEILVYERLSGGGEARLHGQSSIGVGGHMNDVPGAESINEVLRVNAQRELEEEVGLSEQDSQNMEYIGFINDDNNEVGKVHIGVVFKITVSTNDVEAKETDTLRIKWIEKGNIESYDDFETWSALILQDL

SEQ ID NO: 12632 - protein, 308 aa, Staphylococcus aureus; identical to SEQ ID NO: 5306

SEQ ID NO: 12633 - protein, 222 aa, Staphylococcus aureus; identical to SEQ ID NO: 5307

SEQ ID NO: 12634 - protein, 324 aa, Staphylococcus aureus
MKFDRHRRLRSSATMRDMVRENHVRKEDLIYPIFVVEKDDVKKEIKSLPGVYQISLNLLESELKEAYDLGIRAIMFFGVPNSKDDIGTGAYIHDGVIQQATRIAKKMYDDLLIVADTCLCEYTDHGHCGVIDDHTHDVDNDKSLPLLVKTAISQVEAGADIIAPSNMMDGFVAEIRRGLDEAGYYNIPIMSYGVKYASSFFGPFRDAADSAPSFGDRKTYQMDPANRLEALRELESDLKEGCDMMIVKPALSYLDIVRDVKNHTNVPVVAYNVSGEYSMTKAAAQNGWIDEERVVMEQMVSMKRAGADMIITYFAKDICRYLDK

SEQ ID NO: 12635 - protein, 33 aa, Staphylococcus aureus
MDMKPKYDPREVEAGRYEEWVKNGYFKPSEDKS

SEQ ID NO: 12636 - protein, 810 aa, Staphylococcus aureus
MKRMQGYDTLYLPGMDHAGIATQAKVEAKLNEQGITRYDLGREKFLEQAWDWKEEYASFIRAQWAKLGLGLDYSRERFTLDEGLSKAVKKVFVDLYNKGIIYRGERIINWDPKARTALSDIEVIHEDVQGAFYHFKYPYADGEGFIEIATTRPETMLGDTAIVVNPNDERYKDVIGKTVILPIVGRELPILADEYVDIDFGSGAMKVTPAHDPNDFEIGQRHQLENIIVMDENGKMNDKAGKYEGMDRFDCRKQLVEDLKEQDLVIKIEDHVHSVGHSERSGAVVEPYLSTQWFVRMEDLAKRSLDNQKTDDRIDFYPQRFEHTFNQWMENIRDWTISRQLWWGHQIPAWYHKETGEIYVGEEAPTDIENWQQDEDVLDTWFSSALWPFSTLGWPDLESEDFKRYYPTNALVTGYDIIFFWVARMIFQGLEFTDRRPFNDVLLHGLVRAEDGRKMSKSLGNGVDPMDVIDEYGADSLRYFLATGSSPGHDLRYSTEKVESVWNFINKIWNGARFSLMNIGEDFKVEDIDLSGNLSLADKWILTRLNETIATVTDLSDKYEFGEVGRALYNFIWDDFCDWYIEMSKIPMNGNDEEQKQITRSVLSYTLDNIMRMLHPFMPFVTEKIWQSLPHEGDTIVKASWPEVRESLIFEESKQTMQQLVEIIKSVRQSRVEVNTPLSKEIPILIQAKDKEIETTLSQNKDYLIKFCNPSTLNISTDVEIPEKAMTSVVIAGKVVLPLEGLIDMDKEISRLEKELAKLQSELDRVDKKLSNENFVSKAPEKVINEEKRKKQDYQEKYDGVKARIEQLKA

SEQ ID NO: 12637 - protein, 870 aa, Staphylococcus aureus; identical to SEQ ID NO: 5493

SEQ ID NO: 12638 - protein, 105 aa, Staphylococcus aureus
MQSMFAIIETGGKQIKVEEGQEIFVEKLDVNEGDTFTFDKVLFVGGDSVKVGAPTVEGATVTATVNKQGRGKKITVFTYKRRKNSKRKKGHRQPYTKLTIDKINA

SEQ ID NO: 12639 - protein, 106 aa, Staphylococcus aureus
MITVDITVNDEGKVTDVIMDGHADHGEYGHDIVCAGASAVLFGSVNAIIGLTSERPDINYDDNGGHFHIRSVDTNNDEAQLILQTMLVSLQTIEEEYNENIRLNYK

SEQ ID NO: 12640 - protein, 99 aa, Staphylococcus aureus
MRCIPMLKLNLQFFASKKGVSSTKNGRDSESKRLGAKRADGQFVTGGSILYRQRGTKIYPGENVGRGGDDTLFAKIDGVVKFERKGRDKKQVSVYAVAE

SEQ ID NO: 12641 - protein, 433 aa, Staphylococcus aureus
MRYMFVDQVKISLKAGDGGNGITAYRREKYVPFGGPAGGDGGKGASVVFEVDEGLRTLLDFRYQRHFKASKGENGQSSNMHGKNAEDLVLKVPPGTIIKNVETDEVLADLVEDGQRAVVAKGGRGGRGNSRFATPRNPAPDFSEKGEPGEELDVSLELKLLADVGLVGFPSVGKSTLLSIVSKAKPKIGAYHFTTIKPNLGVVSTPDQRSFVMADLPGLIEGASDGVGLGHQFLRHVERTKVIVHMIDMSGSEGREPIEDYKVINQELAAYEQRLEDRPQIVVANKMDLPESQDNLILFKEEIGEDVPVIPVSTITRDNIDQLLYAIADKLEEYKDVDFTVEEEESVGINRVLYKHTPSQDKFTISRDDDGAYVVSGNAIERMFKMTDFNSDPAVRRFARQMRSMGIDDALRERGCKNGDIVRILGGEFEFVE

SEQ ID NO: 12642 - protein, 152 aa, Staphylococcus aureus
MMDNKDYKKFYLIREDVLPESVVKTLKIKDALKSDPTLSIYDAVKQFDLSRSAFYKYRETIFPVDDKMLDHREFTLILYVTDIVGMLARVLDVISKLELSVLTIHQSIPMEEKATITLSLNAKSKETSVEDVIGALRNLDYVSKVELISMSM

SEQ ID NO: 12643 - protein, 354 aa, Staphylococcus aureus
MNILQSRMRRENNVNIEEFDYDLPESLIAQTPLKDRDHSRLLVMDRETGEMKHLHFKDIIEYFRPGDTLVLNDTRVMPARLFGLKEETGAKVEMLMLTQIEGNDWEVLLKPAKRIKVGNKLNFGNGKIIAECIKEMDQGGRIMRLHYEGILQERLDELGEMPLPPYIKERLDDPDRYQTVYAKESGSAAAPTAGLHFTDELLTEIKNKGVNIAFVTLHVGLGTFRPVSVDDVNDHEMHSEYYQMTQETADLLNDTKSKGHRIISVGTTSTRTLETIRRDHDKFVETSGWTNIFIYPGFDFKAIDGQITNFHLPKSTLVMLVSAFSTRENVLNAYKTAVNLEYRFFSFGDAMLII

SEQ ID NO: 12644 - protein, 384 aa, Staphylococcus aureus
MRILNMPAVTYEHIKTCKQSGARLGIVHTPHGSFETPMFMPVGTKATVKTMSPEELRQIEAKIILGNTYHLWLQPGNDIIKHAGGLHKFMNWDGPILTDSGGFQVFSLSNLRKITEEGVEFRHHTNGSKLFLSPEKSMQIQNDLGSDIMMAFDECPPMPAEYDYVKKSIERTTRWAKRCLDAHQRPEDQALFGIIQGGEYEDLREQSAKDLVELDFPGYAIGGLSVGEPKPVMYKMVEHTEQFMPKDKPRYLMGVGSPDALIECSIRGMDMFDCVLPTRIARNGTCMTSQGRLVIKNAKFADDLRPLDENCDCYTCQNYSRAYIRHLIKAEETFGIRLTTIHNLHFLLKLMEDIRQAIREDRLLDFKEEFFEQYGLNVENPKNF

SEQ ID NO: 12645 - protein, 757 aa, Staphylococcus aureus
MIKPKYKWKLIKPTEYISDELTSKLKLTPIVKKILESKSIIDEQAIESIISDTDINHDALQLSDMTKTIERIKRAIANDEKILVYGDYDADGVTSTTILVTTLQLLGAQVGWHIPNRFTEGYGPNELAFRNAHDEGITLIITVDNGIQGHNEIKMVQDLGVDVIVTDHHEIGSTLPEAYAIVHPMHPSFNYPFQQLCGAGVAYKLAQALIENVPDYFKALVAIGTIADLVSLTDENRSLVKQGLKVLNDQCPTSVKALLKEAGYNDNIDEETIGFIIGPRLNAVGRLDDASLACELLMTDDEEEAAFLAEQVEHFNRERKDIVAAITEEAMAMAEMKVKNGDLFLLLAKENWHEGVLGIVASKIVETFALPTLILNIDREQNHAKGSARSIDQVSMFEILSAHQELIAKFGGHHMAAGMTMDIENIESLAEGLNKWMKELSETTSLDPVKPVDVLLTENDITIKNIRDMNRLRPFGTDFSRPIFEMDDLSVSSVKAIGQQKNHLKLTLGESNIAALFWQNGHLEPELQDEQPINILGSVQINEWNGNQSPQLIIQDIAMNEQQILDYRSKRKSLPFTENDENIVVLIHPKSDKVNANEYYYGEEIKQQTDKVVLRDLPTSMEDLSNSLQQLQFSQLYIVLQHNHSIYFDGIPNMDVFKKCYKALITKQETNIQKEGMLLCQHLSVKPDTLKFMLKVFLDLKFVTQEDGLIRINQQPDKRSIDSSKVYQLRQQRMDVEKQLLYQDFSEMKNWIKSQLS

SEQ ID NO: 12646 - protein, 736 aa, Staphylococcus aureus
MNGVYHIMNNEYPYSADEVLHKAKSYLSADEYEYVLKSYHIAYEAHKGQFRKNGLPYIMHPIQVAGILTEMRLDGPTIVAGFLHDVIEDTPYTFEDVKEMFNEEVARIVDGVTKLKKVKYRSKEEQQAENHRKLFIAIAKDVRVILVKLADRLHNMRTLKAMPREKQIRISRETLEIYAPLAHRLGINTIKWELEDTALRYIDNVQYFRIVNLMKKKRSEREAYIETAIDRIRTEMDRMNIEGDINGRPKHIYSIYRKMMKQKKQFDQIFDLLAIRVIVNSINDCYAILGLVHTLWKPMPGRFKDYIAMPKQNLYQSLHTTVVGPNGDPLEIQIRTFDMHEIAEHGVAAHWAYKEGKKVSEKDQTYQNKLNWLKELAEADHTSSDAQEFMETLKYDLQSDKVYAFTPASDVIELPYGAVPIDFAYAIHSEVGNKMIGAKVNGKIVPIDYILQTGDIVEIRTSKHSYGPSRDWLKIVKSSSAKGKIKSFFKKQDRSSNIEKGRMMVEAEIKEQGFRVEDILTEKNIQVVNEKYNFANEDDLFAAVGFGGVTSLQIVNKLTERQRILDKQRALNEAQEVTKSLPIKDNIITDSGVYVEGLENVLIKLSKCCNPIPGDDIVGYITKGHGIKVHRTDCPNIKNETERLINVEWVKSKDATQKYQVDLEVTAYDRNGLLNEVLQAVSSTAGNLIKVSGRSDIDKNAIINISVMVKNVNDVYRVVEKIKQLGDVYTVTRVWN

SEQ ID NO: 12647 - protein, 291 aa, Staphylococcus aureus; identical to SEQ ID NO: 5397

SEQ ID NO: 12648 - protein, 420 aa, Staphylococcus aureus; identical to SEQ ID NO: 5343

SEQ ID NO: 12649 - protein, 420 aa, Staphylococcus aureus
MTNVLIEDLKWRGLIYQQTDEQGIEDLLNKEQVTLYCGADPTADSLHIGHLLPFLTLRRFQEHGHRPIVLIGGGTGMIGDPSGKSEERVLQTEEQVDKNIEGISKQMHNIFEFGTDHGAVLVNNRDWLGQISLISFLRDYGKHVGVNYMLGKDSIQSRLEHGISYTEFTYTILQAIDFGHLNRELNCKIQVGGSDQWGNITSGIELMRRMYGQTDAYGLTISLVTKSDGKKFGKSESGAVWLDAEKTSPYEFYQFWINQSDEDVIKFLKYFTFLGKEEIDRLEQSKNEAPHLREAQKTLAEEVTKFIHGEDALNDAIRISQALFSGDLKSLSAKELKDGFKDVPQVTLSNDTTNIVEVLIETGISPSKRQAREDVNNGAIYINGERQQDVNYALAPEDKIDGEFTIIRRGKKKYFMVNYQ

SEQ ID NO: 12650 - protein, 517 aa, Staphylococcus aureus; identical to SEQ ID NO: 5722

SEQ ID NO: 12651 - protein, 525 aa, Staphylococcus aureus
MKMMPRKFRVLQIGGDDLEPIFQHKKGVSWDYFDIGLFEFDSGYVEAIEAIVEAEGRFDFIYIQAPYSETLTNLLQMISEPYNTYVDESFWSVEYEQDENVQKYVVQPLHYRNIEERNNKLEAVSFSGQYGDKVSPKLALVHPNFKGDVVYQGNSELTLSGEFGKEFKPIASWQNNLVYDKDKVIQIWPEFDIDGAVELQYTFRLIQTGADGALIEQIILTDEMLDSPLEIPTKPFDAYISVTVKARGNGTVHLGPIHKRWSRLDMGQFLLGGSRFVDSQRQEFIYYFHPGDMKPPLNVYFSGYRTAEGFEGYYMMKRMNAPFLLIGDPRVEGGSFYIGSSEYEQGIINVIDETLEKLNFKSHELILSGLSMGSFGALYYGAQLNPQAIIVGKPLVNIGTIAEHMRLLRPEEFGTALDVLVSNEGDTSQASIQALNQKFWQTFQKKSLSQTIFAIAYMQHDDYDPHAFQELLPVLTAHQARVMNRSIPGRHNDDSPTIASWFVNFYNIILEDKFGRVQHAEKQNI

SEQ ID NO: 12652 - protein, 328 aa, Staphylococcus aureus
MKENFWSELPRPFFILAPMEDVTDIVFRHVVSEAARPDVFFTEFTNTESFCHPEGIHSVRGRLTFSEDEQPMVAHIWGDKPEQFRETSIQLAKMGFKGIDLNMGCPVANVAKKGKGSGLILRPDVAAEIIQATKAGGLPVSVKTRLGYYEIDEWKDWLKHVFEQDIANLSIHLRTRKEMSKVDAHWELIEAIKNLRDEIAPNTLLTINGDIPDRKTGLEFAEKYGIDGVMIGRGIFHNPFAFEKEPREHTSKELLDLLRLHLSLCNKYEKDEIRQFKSLRRFFKIYVRGIRGASERRHQLMNTQSIAEARALLDEFEAQMDEDVKLEL

SEQ ID NO: 12653 - protein, 188 aa, Staphylococcus aureus
MRNKIFVWKREIIMNKTSKVCVAATLALGTLIGVTVVENSAPTSKQAQAAITPYYTYNGYIGNNANFILDKNFINAIKYDNVKFNGIKLAKTNTIKKVEKYDQTFKGVSAKGNEASQLQFVVKNNISLKDIQKAYGKDLKKENGKTKEADSGIFYYQNAKKTLGIWFVVDHNRVVEVTVGHTPYKTSK

SEQ ID NO: 12654 - protein, 322 aa, Staphylococcus aureus
MFFKRSDKNMKEKIVIALGGNAIQTKEATAEAQQTAIRRAMQNLKPLFDSPARIVISHGNGPQIGSLLIQQAKSNSDTTPAMPLDTCGAMSQGMIGYWLETEINRILTEMNSDRTVGTIVTRVEVDKNDPRFDNPTKPIGPFYTKEEVEELQKEQPDSVFKEDAGRGYRKVVASPLPQSILEHQLIRTLADGKNIVIACGGGGIPVIKKENTYEGVEAVIDKDFASEKLATLIEADTLMILTNVENVFINFNEPNQQQIDDIDVATLKKYAAQGKFAEGSMLPKIEAAIRFVESGENKKVIITNLEQAYEALIGNKGTHIHM

SEQ ID NO: 12655 - protein, 151 aa, Staphylococcus aureus
MSTNKNDYEHMLFYFAYKTFITTADEIIEKYGMSRQHHRFLFFINKLPGITIKSLLEILEISKQGSHATLQKLKEQGLIIEKVLETDRRVKKLYSTDKGDQLIAELNKAQDELLQNIYQQVGSDWYDVMEALAKGRPGFDFIKHLKDEKES

SEQ ID NO: 12656 - protein, 474 aa, Staphylococcus aureus
MLSVKKATKFAVANLIIVSTVFSSVTPAIAQSDKSSKDESFAVGNTKNPKNVIFLVGDGMGPSFNTAYRYYKNDPHAKEMTPTAFDSYLKGTNRTYSNDPKQNITDSAAGGTAFSSGHKTYNGAIGVDSNKQKVKTVLERAKEKGKSTGLVSTAELTDATPAAYAAHVTSRDDKNEIAKQFYKDKINGKHKVDVLLGGGAKYFGKSNGNLDKKFKKDGYDLATNSKELSKSDKDKVLGLFADKNMPLAIDASKDEPSLADMQQSALSKLERNKKGFFLMVEGASIDKSAHSNDITGVMSEMEGFEKAFDDAIQYAKKHKDTLVVATADHSTGGLTIGKDKGYEWNPQPIKSMKHSGSYMTEKMAKGEDPEKVINEGYGFEFSQDDMKKVKKENKKLKRLLKKEKDEKSADVEKQTKALQHAIQKPVNDKSYTGWTSDGHTGEDVNTYAYGPRSESFSGNIENTESAKIIFDIFK

SEQ ID NO: 12657 - protein, 496 aa, Staphylococcus aureus; identical to SEQ ID NO: 5644

SEQ ID NO: 12658 - protein, 605 aa, Staphylococcus aureus
MFWLAKFSNSTITNQPLTNISCNTHFEIQQTLEVITMSKKNKSYDYVIIGGGSAGSVLGNRLSEDKDKEVLVLEAGRSDYFWDLFIQMPAALMFPSGNKFYDWIYSTDEEPHMGGRKVAHARGKVLGGSSSINGMIYQRGNPMDYEGWAEPEGMETWDFAHCLPYFKKLEKTYGAAPYDKFRGHDGPIKLKRGPATNPLFQSFFDAGVEAGYHKTPDVNGFRQEGFGPFDSQVHRGRRMSASRAYLHPAMKRKNLTVETRAFVTEIHYEGRRATGVTYKKNGKLHTIDANEVILSGGAFNTPQLLQLSGIGDSEFLKSKGIEPRVHLPGVGENFEDHLEVYIQHKCKEPVSLQPSLDIKRMPFIGLQWIFTRTGAAASNHFEGGGFVRSNNEVDYPNLMFHFLPIAVRYDGQKAAVAHGYQVHVGPMYSNSRGSLKIKSKDPFEKPSIRFNYLSTEEDKKEWVEAIRVARNILSQKAMDPFNGGEISPGPEVQTDEEILDWVRRDGETALHPSCSAKMGPASDPMAVVDPLTMKVHGMENLRVVDASAMPRTTNGNIHAPVLMLAEKAADIIRGRKPLEPQYIDYYKHGVHDENEGAIEVKPYAK

SEQ ID NO: 12659 - protein, 159 aa, Staphylococcus aureus
MTKNINEMKACIMNIYDEYRSYVIEELDDCLTIQKNNDTAYYDVLEAINDLSNDSLCVLNHLYINEGQEETFEQKFLQRNKHLKNVDGFKALRFLRPRTAGRHYIIITLWENRQAFYHWQNSAEYKHTHKHRGTSKGADVKIINRELSYNIRIELADMV

SEQ ID NO: 12660 - protein, 299 aa, Staphylococcus aureus
MESMNKEQLEKMKNGKGFIAALDQSGGSTPKALKEYGVNEDQYSNEDEMFQLVHDMRTRVVTSPSFSPDKILGAILFEQTMDREVEGKYTADYLADKGVVPFLKVDKGLAEEQNGVQLMKPIDNLDSLLDRANERHIFGTKMRSNILELNEQGIKDVVEQQFEVAKQIIAKGLVPIIEPEVNINAKDKAEIEKVLKAELKKGLDSLNADQLVMLKLTIPTEANLYKDLAEHPNVVRIVVLSGGYSREKANELLKNNAELIASFSRALASDLRAGQSKEEFDKALGDAVESIYDASVNKN

SEQ ID NO: 12661 - protein, 234 aa, Staphylococcus aureus
MTNVLYQHGTLGTLMAGLLEGTATINELLEHGNLGIATLTGSDGEVIFLDGKAYHANEHKEFIELKGDEKVPYASITNFKASKTFPLQQLSQDDVFAQIKNEMLSENLFSAVKIYGTFKHMHVRMMPAQQPPYTRLIDSARRQPEEKRQDIRGAIVGFFTPELFHGVGSAGFHIHFADDERAYGGHVLDFEVDDVVVEIQNFETFQQHFPVNNETFVKAKIDYKDVAEEIREAE

SEQ ID NO: 12662 - protein, 263 aa, Staphylococcus aureus
MKQKQTKISMVTAYDFPSAKQVEAAGIDMILVGDSLGMTVLGYESTVQVTLADMIHHGRAVRRGAPNTFVVVDMPIGAVGISMTQDLNHALKLYQETNANAIKAEGAHITPFIEKATAIGIPVVAHLGLTPQSVGVMGYKLQGATKEAAEQLILDAKNVEQAGAVALVLEAIPNDLAEEISKHLTIPVIGIGAGKGTDGQVLVYHDMLNYGVEHKAKFVKQFADFSVGVDGLKQYDQEVKSGAFPSEEYTYKKKIMNEVNNND

SEQ ID NO: 12663 - protein, 786 aa, Staphylococcus aureus
MIIYWCMTVNGGNEMKALLLKTSVWLVLLFSAMGLWQVSNAAEQHTPMKAHAVTTIDKATTDKQQVPPTKEAAHHYGEEAATNVSASAQGTVDDINNKVTSNAPSNKPSTAVSATVNETRDVDTQQASTQKPTRTATFKLSNAETASLSPRMFAANAPQTTTHKILHTNDIHGRLAEEKGRVIGMAKLKTVKEQEKPDLMLDAGDAFQGLPLSNQSKGEEMAKAMNAVGYDAMAVGNHEFDFGYDQLKKLEGMLDFPMLSTNVYKDGKRAFKPSTIVTKNGIRYGIIGVTTPETKTKTRPEGIKGVEFRDPLQSVTAEMMRIYKDVDTFVVISHLGIDPSTQETWRGDYLVKQLSQNPQLKKRITVIDGHSHTVLQNGQIYNNDALAQTGTALANIGKITFNYRNGEVSNIKPSLINVKDVENVIPNKALAEQINQADQTFRAQTAEVIIPNNTIDFKGERDDVRTRETNLGNAIADAMEAYGVKNFSKKTDFAVTNGGGIRASIAKGKVTHYDLISVLPFGNTIAQIDVKGSDVWTAFEHSLGAPTTQKDGKTVLTANGGLLHISDSIRVYYDMNKPSGKRINAIQILNKETGKFENIDLKRVYHVTMNDFTASGGDGYSMFGGPREEGISLDQVLASYLKTANLAKYDPTEPQRMLLGKPAVSEQPAKGQQSSKGSKSGKDAQPIGKDKVMNPAKQPAPSKVVLLPTHRGTDSSGREGSDRALEGTAVSSKSGKQLASMSAPKGSTHEKQLPKTGNDQSSSPAAMFVLVAGIGLIATVRRRKAS

SEQ ID NO: 12664 - protein, 91 aa, Staphylococcus aureus; identical to SEQ ID NO: 5914

SEQ ID NO: 12665 - protein, 123 aa, Staphylococcus aureus; identical to SEQ ID NO: 5611

SEQ ID NO: 12666 - protein, 98 aa, Staphylococcus aureus; identical to SEQ ID NO: 5612

SEQ ID NO: 12667 - protein, 603 aa, Staphylococcus aureus
MDTKDFKRLEKMYSPRYLPGLDGLRAFAVIGIIIYHLNAQWLSGGFLGVDTFFVISGYLITSLLISEYYRTQKIDLLEFWKRRLKRLIPAVLFLICVVLMFTLIFKPELIIQMKRDAIAAIFYVSNWWYISQNVDYFNQFAIEPLKHLWSLAIEEQFYLLFPLVITFLLHRFKPRNIIQTLFIVSLISLGLMIVIHFITGDNSRVYFGTDTRLQTLLLGCILAFIWPPFALKKDISKKIVVSLDIIGISGFAVLMTLFFIVGDQDQWIYNGGFYIISFATLFIIAIAVHPSSLFAKFLSMKPLLIIGKRSYSLYLWHYPIIVFVNSYYVQGQIPVYVYIIEILLTALMAEISYRFIETPIRKKGFKAFAFLPKKKSQFARTVLVILLLIPSIIVLSGQFDALGKQHEAEKKEKKTEFKTTKKKVVKKDKQEDKQTANSKEDIKKSSPLLIGDSVMVDIGNVFTKKIPNAQIDGKVGRQLVDATPIVKSQYKDYAKKGQKVVVELGTNGAFTKDQLNELLDSFGKADIYLVSIRVPRDYEGRINKLIYEAAEKRSNVHLVDWYKASAGHPEYFAYDGIHLEYAGSKALTDLIVKTMETHATNKK

SEQ ID NO: 12668 - protein, 802 aa, Staphylococcus aureus
MANTKKTTLDITGMTCAACSNRIEKKLNKLDDVNAQVNLTTEKATVEYNPDQHDVQEFINTIQHLGYGVAVETVELDITGMTCAACSSRIEKVLNKMDGVQNATVNLTTEQAKVDYYPEETDADKLVTRIQKLGYDASIKDNNKDQTSRKAEALQHKLIKLIISAVLSLPLLMLMFVHLFNMHIPALFTNPWFQFILATPVQFIIGWQFYVGAYKNLRNGGANMDVLVAVGTSAAYFYSIYEMVRWLNGSTTQPHLYFETSAVLITLILFGKYLEARAKSQTTNALGELLSLQAKEARILKDGNEVMIPLNEVHVGDTLIVKPGEKIPVDGKIIKGMTAIDESMLTGESIPVEKNVDDTVIGSTMNKNGTITMTATKVGGDTALANIIKVVEEAQSSKAPIQRLADIISGYFVPIVVGIALLTFIVWITLVTPGTFEPALVASISVLVIACPCALGLATPTSIMVGTGRAAENGILFKGGEFVERTHQIDTIVLDKTGTITNGRPVVTDYHGDDQTLQLLATAEKDSEHPLAEAIVNYAKEKQLTLTETTTFKAVPGHGIEATIDHHHILVGNRKLMADNDISLPKHISDDLTHYERDGKTAMLIAVNYSLTGIIAVADTVKDHAKDAIKQLHDMGIEVAMLTGDNKNTAQAIAKQVGIDTVIADILPEEKAAQIAKLQQQGKKVVMVGDGVNDAPALVKADIGIAIGTGTEVAIEAADITILGGDLMLIPKAIYASKATIRNIRQNLFWAFGYNIAGIPIAALGLLAPWVAGAAMALSSVSVVTNALRLKKMRLEPRRKDA

SEQ ID NO: 12669 - protein, 608 aa, Staphylococcus aureus; identical to SEQ ID NO: 5677

SEQ ID NO: 12670 - protein, 457 aa, Staphylococcus aureus
MKDAALTRRFNEVLVNEPSARDTVEILKGIREKFEAHHQVKLPDDVLKACVDLSIQYIPQRLLPDKAIDVLDITAAHLSAQSPAIDKVATEKRISELEHDKRKAVSAEEYKKADDIQNEIKSLQDKLENSNGEHTAVATVHDISDTIQRLTGIPVSQMDANDIERLKNISSRLRSKIIGQDKAVEMVSRAIRRNRAGFDDGNRPIGSFLFVGPTGVGKTELAKQLAIDLFGNKEALIRLDMSEYSDTTAVSKMIGTTAGYVGYDDNSNTLTEKVRRNPYSVILFDEIEKANPQILTLLLQVMDDGNLTDGQGNVINFKNTIIICTSNAGFGNGTDQEYDDIMQEMKKFFRPEFLNRFNGIVEFLHLDKESLQEIINLLLDDVQVTFDKKGITMNVSQDAKDWLIEEGYDEELGARPLRRIVEQQVRDKITDYYLDHTDVKHVDLDIEDNELVVKGKS

SEQ ID NO: 12671 - protein, 231 aa, Staphylococcus aureus
MMFMNNNFFNSDFDSILRRMMQDMQNSNQTSNKKYYINGKEVSPEELAQFTQQGGNHSAEQSAQAFQQAALRQQGQQSGNGNYLEQIGRNLTQEARDGLLDPVIGRDKEIQETAEVLSRRTKNNPILVGEAGVGKTAIVEGLAQAIVEGNVPAAIKDKEIISIDISSLEAGTQYRGAFEENIQKLVEGVKSSQNAVLFFDEIHQIIGSGATGSDSGSKGLSDILKPALSRG

SEQ ID NO: 12672 - protein, 185 aa, Staphylococcus aureus; identical to SEQ ID NO: 5698

SEQ ID NO: 12673 - protein, 428 aa, Staphylococcus aureus; identical to SEQ ID NO: 5699

SEQ ID NO: 12674 - protein, 235 aa, Staphylococcus aureus
MQMARKVVVVDDEKPIADILEFNLKKEGYDVYCAYDGNDAVDLIYEEEPDIVLLDIMLPGRDGMEVCREVRKKYEMPIIMLTAKDSEIDKVLGLELGADDYVTKPFSTRELIARVKANLRRHYSQPAQDTGNVTNEITIKDIVIYPDAYSIKKRGEDIELTHREFELFHYLSKHMGQVMTREHLLQTVWGYDYFGDVRTVDVTIRRLREKIEDDPSHPEYIVTRRGVGYFLQQHE

SEQ ID NO: 12675 - protein, 427 aa, Staphylococcus aureus; identical to SEQ ID NO: 5675

SEQ ID NO: 12676 - protein, 206 aa, Staphylococcus aureus; identical to SEQ ID NO: 5751

SEQ ID NO: 12677 - protein, 466 aa, Staphylococcus aureus
MDRMYEQNQMPHNNEAEQSVLGSIIIDPELINTTQEVLLPESFYRGAHQHIFRAMMHLNEDNKEIDVVTLMDQLSTEGTLNEAGGPQYLAELSTNVPTTRNVQYYTDIVSKHALKRRLIQTADSIANDGYNDELELDAILSDAERRILELSSSRESDGFKDIRDVLGQVYETAEELDQNSGQTPGIPTGYRDLDQMTAGFNRNDLIILAARPSVGKTAFALNIAQKVATHEDMYTVGIFSLEMGADQLATRMICSSGNVDSNRLRTGTMTEEDWSRFTIAVGKLSRTKIFIDDTPGIRINDLRSKCRRLKQEHGLDMIVIDYLQLIQGSGSRASDNRQQEVSEISRTLKALARELECPVIALSQLSRGVEQRQDKRPMMSDIRESGSIEQDADIVAFLYRDDYYNRGGDEDDDDDSGFEPQTNDENGEIEIIIAKQRNGPTGTVKLHFMKQYNKFTDIDYAHADMM

SEQ ID NO: 12678 - protein, 268 aa, Staphylococcus aureus
MAFHDKTATQVTNIELNVRDLDLMTTFYKNILGLSVKSSDDNTTVLSVGTGGHTLTLHLLEDGRQTSPREAGLFHIAFLLPTTEDLANFLYFVAQKNMGIGAGDHLVSEALYFNDPEGNGIEVYRDRPSSSWEWQNGKVKMDTLEVDSQTLLTHRTDEGWQGMPAKGMIGHLHLKTHDLDAAYQCYIEQLGFQHVSDFPRALFMSTNHYHHHIAANTWQSNQARQNNAQSYGLTHVDIYQPDASTHTFTAPEGFDITVHSNTDLVPEK

SEQ ID NO: 12679 - protein, 144 aa, Staphylococcus aureus; identical to SEQ ID NO: 5458

SEQ ID NO: 12680 - protein, 198 aa, Staphylococcus aureus
MMEHIFREGQNGAPTLILLHGTGGDEFDLLPLGEALNENYHLLSIRGQVSENGMNRYFKRLGEGVYDEEDLAFRGQELLTFIKEAAERYDFDIEKAVLVGFSNGSNIAINLMLRSEAPFKKALLYAPLYPIEVTSTKNLSDVSVLLSMGKHDPIVPLAASEQVINLFKTRGAQVEEVWVNDHEITETGLTAGQQLLGK

SEQ ID NO: 12681 - protein, 148 aa, Staphylococcus aureus; identical to SEQ ID NO: 5673

SEQ ID NO: 12682 - protein, 651 aa, Staphylococcus aureus; identical to SEQ ID NO: 5331

SEQ ID NO: 12683 - protein, 162 aa, Staphylococcus aureus
MFNMFHFIIMVVYNMNYNILEVKEMPFTMKGYPEKWKEFEVIKRQKAIEIANAMLKEGYLEKDVVPIAAKKAKDWYRALSKEEIKALEEENFVQFHTATMEKTEVDSEYATTDNEEHIQEQSNQDKSYFDSESIGNQSGGVRQREPLMDGPHPKVVESFKDV

SEQ ID NO: 12684 - protein, 235 aa, Staphylococcus aureus; identical to SEQ ID NO: 5455

SEQ ID NO: 12685 - protein, 661 aa, Staphylococcus aureus
MNRGGIMNRQSTKKALLIPFVIMIITAIVLMGVWFIFNSLIALIASIVLVVMIIVSIVLFRQALMKMDSYVDGLSAQISTTNNKAIKHLPIGIIVLDENDHIEWVNQFMTDHMEANVISESVNEVFPNILKQLDRVKSVEIEYNQYHFQVRYSENDHCLYFFDITEQVQTNELYENSKPIIATLFLDNYDEITQNMNDTQRSEINSMVTRVISRWATEYNIFFKRYSSDQFVAYLNQKILADLEESKFDILSQLREKSVGYRAQLTLSIGVGEGTENLIDLGELSQSGLDLALGRGGDQVAIKSINGNVRFYGGKTDPMEKRTRVRARVISHALKDILAEGDKVIIMGHKRPDLDAIGAAIGVSRFAMMNNLEAYIVLNETDIDPTLRRVMNEIDKKPELRERFITSDDAWDMMTSKTTVVIVDTHKPELVLDENVLNKANRKVVIDHHRRGESFISNPLLVYMEPYASSTAELVTELLEYQPTEQRLTRLESTVMYAGIIVDTRNFTLRTGSRTFDAASYLRAHGADTILTQHFLKDDVDTYINRSELIRTVKVEDNGIAIAHGSEDKIYHPVTVAQAADELLSLEGIEASYVVARREDNLIGISARSLGSVNVQLTMEALGGGGHLTNAATQLKGVTVEEAIAQLQQAITEQLSRSEDA

SEQ ID NO: 12686 - protein, 1001 aa, Staphylococcus aureus
MKNNLRYGIRKHKLGAASVFLGTMIVVGMGQDKEAAASEQKTTTVEENGNSATDNKTSETQTTATNVNHIEETQSYNATATEQPSNATQVTTEEAPKAVQAPQTAQPANLETVKEEVVKEEAKPQVKETTQPQDNSGDQKQVDLTPKMATQNQAAETQVEVAQPRTVSESNPRVTRSADVVEAKEASDAKVETGTDVTSKVTVESGSIEAPQGNKVEPHAGQRVVLKYKLKFEKGLHKGDYFDFTLSNNVNTYGVSTARKVPEIKNGSVVMATGQLLGNGKIRYTFTDYIDYKVNVTADLEINLFIDPKTVQSNGQQTITSTLNDKETKNTLPIEYNPGVSNSYANVNGSIETFDKGNNRFTHVAYIKPQNGHKSDSVSITGTLTQGSKADGKAPTVKVYEVLKDANELPQSVYANVSDSSMFKDVTEEMKDKLKVENNGNYKLDIEKLEKSYVIHYDGEYLSGSDQVNFRTHMFGYPEQQYKYYYTHLGYKLTWDNGLVLYSNKAKGDGTNGTITESNNMTFDEEYGTGVITGQYDKNLVTTVEEEYDSSTLDIDYHTAIDGEGGYVDGYIETIEETDSSAIDIDYHTAVDSEAGHVGGYTESSEESNPIDFEESTHENSKHHADVVEYEEDTNPGGGQVTTESNLVEFDEESIKGIVTGAVSDHTTVEDTKEYTTESNLIELVDELPEEHGQAQGPIEEITENNHHISHSGLGTENGHGNYGVIEEIEENSHVDIKSELGYEGGQNSGNQSFEEDTEEDKPKYEQGGNIVDIDFDSVPQIQGQNNGNQSFEEDTEKDKPKYEQGGNIIDIDFDSVPQIHGFNKHNEIIEEDTNKDKPNYQFGGHNSVDFEEDTLPKVSGQNEGQQTIEEDTTPPTPPTPEVPSEPGEPTPPTPEVPSEPETPTPPTPEVPAEPGKPVPPAKEEPKKPSKPVEQGKVVTPVIEINEKVKAVAPTKQKQSKKSELPETGGEESTNKGMLFGGLFSILGLALLRRNKKNHKA

SEQ ID NO: 12687 - protein, 512 aa, Staphylococcus aureus
MTSKHQQKGSIVNRFLNSVEKIGNKLPDPSVLFFLMCVGLAIMTWVISLFNVSVKHPGTHQTIYIKNIISHDGFTMIMNDTIKNFSEFPALGLVLAVMIGIGVAEKTGYFDKLMISVVNRAPRFLILPTIILIGILGSTAGDAATIILPPLAAMLFIKIGYHPIAGLTMAYASAVGGFAANIVVGMQDVLVYSFTEPATRIVSDSIKTNVAMNWYFIAASVVVLLPTILLVTTKLIIPRLGQYDDRLMHDDHEETSSHITDKEAHALKWANISFIVTIILLIITAIPEHSFLRNAKTGSLLDDAPLINGVGLIILVVFLVPGLVYGILSKEIKNTKDLGKMFGDAVGSMGTFIVIVFFAAQLLAYLKWSNLGIIAAVKGAKLLEHQNGIVLILGIIVLSAMVNMLIGSASAKWGILGPIFVPMLILIGFHPAFTQVIYRVGDSITNPITPMMPYLPLLLTYAQKYDKRMKLGALLSSLMPYSIALSIVWTVFVIIWFLLGIPVGPGGPIFVK

SEQ ID NO: 12688 - protein, 272 aa, Staphylococcus aureus
MKRLENKVAVVTGASTGIGQASAIALAQEGAYVLAVDIAEAVSETVDKIKSNGDKAKAYVVDIASEQQIDNFASEIREQFGHVDVLFNNAGVDNAAGRIHEYPTDVYDKIMNVDMRGTFLMTKMMLPLMMTKGGSIVNTSSFSGQAADLYRSGYNAAKGAVINFTKSIAIEYGRDGIRANAIAPGTIETPLVDKLTGTSEDKEGKAFRENQKWMTPLGRLGKPEEVGKLVVFLASDESSFITGETIRIDGGVMAYTWPGEMLSDDSWKRTLE

SEQ ID NO: 12689 - protein, 272 aa, Staphylococcus aureus; identical to SEQ ID NO: 5690

SEQ ID NO: 12690 - protein, 433 aa, Staphylococcus aureus; identical to SEQ ID NO: 5691

SEQ ID NO: 12691 - protein, 286 aa, Staphylococcus aureus
MFIMSKIFVTGATGLIGIKLVQRLKEEGHEVAGFTTSENGQQKLAAVNVKAYIGDILKADTIDQALADFKPEIIINQITDLKNVDMAANTKVRIEGSKNLIDAAKKHDVKKVIAQSIAFMYEPGEGLANEETSLDFNSTGDRKVTVDGVVGLEEETARMDEYVVLRFGWLYGPGTWYGKDGMIYNQFMDGQVTLSDGVTSFVHLDDAVETSIQAIHFENGIYNVADDAPVIGSEFAEWYKEQLGVEPNIDIQPAQPFERGVSNEKFKAQGGTLIYKTWKDGMNPIK

SEQ ID NO: 12692 - protein, 504 aa, Staphylococcus aureus
MTLYLDGETLTIEDIKSFLQQQSKIEIIDDALERVKKSRAVVERIIENEETVYGITTGFGLFSDVRIDPTQYNELQVNLIRSHACGLGEPFSKEVALVMMILRLNTLLKGHSGATLELVRQLQFFINERIIPIIPQQGSLGASGDLAPLSHLALALIGEGKVLYRGEEKDSDDVLRELNRQPLNLQAKEGLALINGTQAMTAQGVISYIEAEDLGYQSEWIAALTHQSLNGIIDAYRHDVHAVRNFQEQINVAARMRDWLEGSTLTTRQAEIRVQDAYTLRCIPQIHGASFQVFNYVKQQLEFEMNAANDNPLIFEGANETFVISGGNFHGQPIAFALDHLKLGVSELANVSERRLERLVNPQLNGDLPAFLSPEPGLQSGAMIMQYAAASLVSENKTLAHPASVDSITSSANQEDHVSMGTTAARHGYQIIENARRVLAIECVIALQAAELKGVEGLSPKTRRKYDEFRSIVPSITHDRQFHKDIEAVAQYLKQSIYQTTACH

SEQ ID NO: 12693 - protein, 325 aa, Staphylococcus aureus; identical to SEQ ID NO: 5783

SEQ ID NO: 12694 - protein, 321 aa, Staphylococcus aureus; identical to SEQ ID NO: 5771

SEQ ID NO: 12695 - protein, 644 aa, Staphylococcus aureus; identical to SEQ ID NO: 5670

SEQ ID NO: 12696 - protein, 268 aa, Staphylococcus aureus; identical to SEQ ID NO: 5600

SEQ ID NO: 12697 - protein, 801 aa, Staphylococcus aureus
MAKQKLVMIGNGMAGIRTIEEILERANDLYDITVIGKEPYPNYNRIMLSNILQNKMTVEETIMNPYEWYEEHGIELITNDPVIEVDRANQSVTTANGIEVSYDKLIFATGSKAFVIPVPGSTLPSVIGWRTIDDTEQMMNIAKTKKKAIVIGGGLLGLECARGLLDQGMEVTVLHLAEWLMEMQLDRKAGNMLKADLEKQGMKFEMQANTTEILGEDDVEGVKLADGREIPADLVVMSVGIRPYTEVAKESGLDVNRGIVVNDVMQTSDSNVYAVGECAEHNGKVYGLVAPLYEQGKVLADHLTNKETNGYKGSTTFTSLKVSGCDLYSAGQIVENAEIKGIEIFNSVDNNYKKIFLKDGNVVGAVLYGDIDDGSRFYNMMKKGESTEDYTLVSLLTKGGEEASLSIADMADDETICGCNGVDKGTIVNAITENGFTTVEEVTAKTKAGNSCGKCKPQIAQILQHTLGDDFVAAKPAGICGCTDLTRDQIVTQIRAKGLKTSKEVRHVLNFKNKGGCPKCRPAINYYLNMVYPHDHEDERESRFANERYHANIQNDGTFSVIPQMRGGVTDADQLIRLGEVAKKYHVPLVKVTGSQRVGLYGVKKEELPNIWEDLGMRSASAYGKKTRSVKSCVGKEFCRFGTQYTTRLGIRLEKTFEYIDTPHKFKMGVSGCPRSCVESGVKDFGIISVENGFQIYIGGNGGTEVEKAEFLTTVETEDEVIKLCGALMQYYRETGIYAERTAPWLRRLGFENVKEVLLNPERQNELFERIMDAKKAVEAEPWEAITSNAQARKIFEVEKV

SEQ ID NO: 12698 - protein, 104 aa, Staphylococcus aureus; identical to SEQ ID NO: 3804

SEQ ID NO: 12699 - protein, 397 aa, Staphylococcus aureus
MILVKVKRMYKTKGGFQLTLQTLSLVVGFMAWSIIAPLMPFIKQDVNVTEGQISIILAIPVILGSVLRVPFGYLTNIVGAKWVFFTSFIVLLFPIFFLSQAQTPGMLMASGFFLGVGGAIFSVGVTSVPKYFPKEKVGLANGIYGMGNIGTAVSSFLAPPIAGIIGWQTTVRSYLIIIALFALIMFIFGDTQERKIKVPLMAQMKTLSKNYKLYYLSYWYFITFGAFVAFGIFLPNYLVNHFGIDKVDAGIRSGVFIALATFLRPIGGILGDKFNAVKVLMIDFVVMIIGAVILGISDHIALFTVGCLTISICAGIGNGLIFKLVPSYFSNEAGSANGIVSMMGGLGGFFPPLVITYVANLTGSSHLAFIFLAVFGCIALFTMRHLYQKEYGSLKNG

SEQ ID NO: 12700 - protein, 377 aa, Staphylococcus aureus
MMEFTIKRDYFITQLNDTLKAISPRTTLPILTGIKIDAKEHEVILTGSDSEISIEITIPKTVDGEDIVNISETGSVVLPGRFFVDIIKKLPGKDVKLSTNEQFQTLITSGHSEFNLSGLDPDQYPLLPQVSRDDAIQLSVKVLKNVIAQTNFAVSTSETRPVLTGVNWLIQENELICTATDSHRLAVRKLQLEDVSENKNVIIPGKALAELNKIMSDNEEDIDIFFASNQVLFKVGNVNFISRLLEGHYPDTTRLFPENYEIKLSIDNGEFYHAIDRASLLAREGGNNVIKLSTGDDVVELSSTSPEIGTVKEEVDANDVEGGSLKISFNSKYMMDALKAIDNDEVEVEFFGTMKPFILKPKGDDSVTQLILPIRTY

SEQ ID NO: 12701 - protein, 453 aa, Staphylococcus aureus; identical to SEQ ID NO: 5668

SEQ ID NO: 12702 - protein, 50 aa, Staphylococcus aureus; identical to SEQ ID NO: 5741

SEQ ID NO: 12703 - protein, 459 aa, Staphylococcus aureus
MDLDTITSISTPMGEGAIGIVRLSGPQAVEIADKLYKGKHLLNDVPSHTINYGHIIDPESKEVVEEVMVSVLRAPKTFTREDIIEINCHGGILTINRVLELTMTYGARMAEPGEFTKRAFLNGRIDLSQAEAVMDFIRSKTDRASKVAMNQIEGRLSDLIKKQRQSILEILAQVEVNIDYPEYDDVEDATTEFLLEQSKEIKQEINRLLDTGAQGKIMREGLSTVIVGKPNVGKSSMLNNLIQDNKAIVTEVAGTTRDVLEEYVNVRGVPLRLVDTAGIRETEDIVEKIGVERSRKALSQADLILFVLNNNEALTQEDYTLYEVVKNEDVIVIVNKMDLEQNIDINEVKDMIGNTPLIQTSMLKQEGIDELEIQIRDLFFGGEVQNQDMTYVSNSRHISLLKQARQTIQDAIDAAESGVPMDMVQIDLTRTWEILGEIIGETASDELIDQLFSQFCLGK

SEQ ID NO: 12704 - protein, 625 aa, Staphylococcus aureus
MAQEYDVIVIGAGHAGVEAGLASARRGAKTLMLTINLDNIAFMPCNPSVGGPAKGIVVREIDALGGQMAKTIDKTHIQMRMLNTGKGPAVRALRAQADKVLYQQEMKRVIEDEENLHIMQGMVDELIIEDNEVKGVRTNIGTEYLSKAVIITTGTFLRGEIILGNMKYSSGPNHQLPSITLSDNLRELGFDIVRFKTGTPPRVNSKTIDYSKTEIQPGDDVGRAFSFETTEYILDQLPCWLTYTNAETHKVIDDNLHLSAMYSGMIKGTGPRYCPSIEDKFVRFNDKPRHQLFLEPEGRNTNEVYVQGLSTSLPEHVQRQMLETIPGLEKADMMRAGYAIEYDAIVPTQLWPTLETKMIKNLYTAGQINGTSGYEEAAGQGLMAGINAAGKVLNTGEKILSRSDAYIGVLIDDLVTKGTNEPYRLLTSRAEYRLLLRHDNADLRLTDMGYELGMISEERYARFNEKRQQIDSEIKRLSDIRIKPNEHTQAIIEQHGGSRLKDGILAIDLLRRPEMTYDIILEILEEKHQLNADIEEQVEIQTKYEGYINKSLQQVEKVKRMEEKKIPEDLDYSKIDSLATEAREKLSEVKPLNIAQASRISGVNPADISILLIYLEQGKLQRVSD

SEQ ID NO: 12705 - protein, 239 aa, Staphylococcus aureus
MTVEWLAEQLKEHNIELNETQKHQFQTYYRLLVEWNEKMNLTSITDEHDVYLKHFYDSIAPSFYFDFNQPISICDVGAGAGFPSIPLKIMFPQLKVTIVDSLNKRIQFLNHLASELQLQDVSFIHDRAETFGKGVYRESYDVVTARAVARLSVLSELCLPLVKKGGQFVALKSSKGEEELEEAKFAISVLGGNVTETHTFELPEDAGERQMFIIDKKRQTPKKYPRKPGTPNKTPLLEK

SEQ ID NO: 12706 - protein, 252 aa, Staphylococcus aureus
MTILSVQHVSKTYGKKHTFQALKDINFDIQKGEFVAIMGPSGSGKTTLLNVLSSIDQISSGSVIANGQELNKLNQKALAKFRKESLGFIFQDYSILPTLTVKENIMLPLSVQKMSKATMEKNYKAITTALGIYDLGNKYPSELSGGQQQRTAAARAFVHKPQIIFADEPTGALDSKSANDLLQRLEEMNKSFDITIVMVTHDPVAASFAERVIMLKDGQIHTQLYQEGRSKQAFYEDIVHLQSVLGGVSNDI

SEQ ID NO: 12707 - protein, 318 aa, Staphylococcus aureus
MNYQVLLYYKYTTIDDPEQFAQDHLAFCKAHHLKGRILVSTEGINGTLSGTKEETEQYMAHMHADERFKDMVFKIDEAEGHAFKKMHVRPRKEIVALDLEEDVDPRHTTGQYLSPVEFRKALEDDDTVIIDARNDYEFDLGHFRGAIRPNITRFRDLPDWIKENKALFADKKVVTYCTGGIRCEKFSGWLLKEGFEDVAQLHGGIATYGKDPETKGQYWDGKMYVFDDRISVDINQVEKTIIGKDWFDGKPCERYINCANPECNKQILVSEENEAKYLGACSYECAKHERNRYVQANNISDNEWQQRLTNFDDLHQHA

SEQ ID NO: 12708 - protein, 171 aa, Staphylococcus aureus
MTNFTFDGAHSSLEFQIKHLMVSKVKGSFDQFDVAVEGDINDFSTLKATATIIPSSINTKNEARDNHLKSGDFFGTDEFDKITFETKSVTENKVVGDLTIKGITNEETFDVEFNGVSKNPMDGSQVTGIIVTGTINREKYGINFNQALETGGVMLGKDVKFEASAEFSISE

SEQ ID NO: 12709 - protein, 374 aa, Staphylococcus aureus; identical to SEQ ID NO: 5579

SEQ ID NO: 12710 - protein, 255 aa, Staphylococcus aureus
MIDIHNHILVDIDDGPKTIEKSIALLKQAKDEGVTSIVATPHHLHPRYDNTFQQVLVKLAELRTHPEVQALDIKLFPGQEIRITDSILQGLDNGSIQGINRSKYLLIEFPTGEVPHYTKQLFFEIQSRGYIPIIAHPERNRSIAKNPEILYELVANGALSQLTSSSLVGGFGKNIQKLSLQFIECNLAHFVASDAHSCDQRPFLMQELFHNHKLKKYSNDIEALLRNASSVINDNFVYLDRPTKPGKVKSFLKWF

SEQ ID NO: 12711 - protein, 119 aa, Staphylococcus aureus
MILRYATNLKLAKELYQASKPKLQEDKGMIELFEHTFGLQKELVKYVGIAEATTAALYSASFINKNISRLASLSTIGILSVAAYKHFEAGHGKKGAQHALDLLGLATLSLLDTFSCNKK

SEQ ID NO: 12712 - protein, 230 aa, Staphylococcus aureus
MNYSPKQGVRSHGLPHDPFKSSTVPRPIGWISTVSKDGKDNLAPYSQYQNLTWDPPMVMFAANQSVLGDHERKDTVKNAEETGWFVWNMATYDLREAVNLSSKALPPEEDEFEYAGVTKEACIEAPGYRVKESPVHFECEYVQTIRIPTGDPVSTVDIVIGRVAQVHIDDKVILDNGKLDIKSIKPIARLGYYDYTVVNEIFEMKAPSASKEELAGLEGRNFDNQSDNKK

SEQ ID NO: 12713 - protein, 2344 aa, Staphylococcus aureus
MSKRQKEFHDSLANEKTRVRLYKSGKNWVKSGIKEIEMFKIMGLPFISHSMVSQDNQSISKKMTGYGLKTTAVIGGAFTVNMLHDQQAFAASDAPLTSELNTQSETVGNQNSTTIDASTSTADSTSVTKNSSSVQTSNSDTVSSEKSENVTSTTNSTSNQQEKLTSTSESTSSKNTTSSSDTKSVTSTSSTEQPINTSTNQSTASNNTSQSTTPTSANLNKTSTTSTSTAPVKLRTFSRLAMSTFASAATTTALTANTITVNKDNLKQYMTTSGNATYDQSTGVVTLTQDTTSQKGAITLGTRIDSNKSFHFSGKVNLGNKYEGHGNGGDGIGFAFSPGVLGETGLNGAAVGIGGLSNAFGFKLDTYHNTSTPNSSAKAKADPSNVAGGGAFGAFVTTDSYGVASTYTSSSTADNAAKLNVQPTNNTFQDFDINYNGDTKVMTVKYAGQTWTRNISDWIAKSGTTNFSLSMTASTGGATNLQQVQFGTFEYTESAVTQVRYVDVTTGKDIIPPKTYSGNVDQVVTIDNQQSALTAKGYNYTSVDSSYASTYNDTNKTVKMTNAGQSVTYYFTDVKAPTVTVGNQTIEVGKTMNPIVLTTTDNGTGTVTNTVTGLPSGLSYDSATNSIIGTPTKIGQSTVTVVSTDQANNKSTTTFTINVVDTTAPTVTPIGDKSSEVFSPISPINIATQDNSGNAVTNTVTGLPSGLTFDSTNNTISGTPTNIGTSTITIVSTDASGNKTTTTFKYEVTRNSMSDSVSTSGSTQQSQSVSTSKADSQSASTSTSGSIMTSTSASTSKSTSVSLSDSVSASKSLSTSESNSVSSSTSTSLVNSQSVSSSMSGSVSKSTSLSDFISNSSSTEKSESVSTSTSDSLRTSTSLSDSVSMSTSGSLSKSQSLSTSTSDSASTSQSVSDSTSNSISTSESLSESGSTSESISISNSISNSVSASTSKLESQSTSISLSTSDSKSMSTSESLSDSTSTSDSVSGSLSVAGSQSVSTSTSDSMSTSEMISDSMSTSGSLAASDSKSMSVSSSMSTSQSGSTSESLSDSISTSDSDSKSLSLSTSQSGSTSTSTSTSSSVRMSESQSTSGSMSTSQSDSTSISTSFSDSTSDSKSASTASSESISQSVSTSTSGSVSTSTSLSTSNSERTSTSMSDSTSLSTSESDSTSDSTSTSDSISEAISGSESTSISLSESNSTSDSESKSASAFLSESLSESTSESTSESLSGSTSDSTSLSDSNSESGSTSTSLSNSTSGSASISTSTSGSASTSTVKSESVSTSLSTSTSTSLSDSTSLSTSLSDSTSGSKSNSLSASMSTSDSISTRKSESLSASTSLSGSTSESESGSTSSSESKSDSTSMSLSMSQSTSGSTSVSTSESLSDSTSTSLSLSASMNQSGVDSNSASQSASTSTSTSTSESDSQSTSSYTSQSTSQSESTSTSTSLSDSTSISKSTSQSGSTSTSASLSGSESESDSQSISTSTSESKSESTSTSLSDSTSTSNSGSASTSTLLSNSASASESDSSSTSLSDSTSASMQSSESDSQSTSTSLSNSQSTSTSIRMSTIASESVSESTSESGSTSESTSESDSTSTSLSDSQSTSRSTSASGSASTSTSTSDSRSTSASTSTSMRTSTLDSQSMSLSTSTSTSVSDSTSLSDSVSDSTSDSTSTSTSGSMSASISLSDSTSTSTSASEVMSASISDSQSMSESVNDSESVSESNSESDSKSMSGSTSVSDSGSLSVSTSLRKSESVSESISLSGSQSMSDSVSTSDSSSLSVSTSQRSSESVSESDSLSDSKSTSGSTSTSTSGSLSTSTSLSGSESVSESSSLSDSISMSDSTSTSDSDSLSGSISLSGSTSLSTSDSLSDSKSLSSSQSMSGSESTSTSVSDSQSSSTSNSQFDSMSISASESDSMSTSDSSSISGSNSTSTSLSTSDSMSGSVSVSTSTSLSDSISGSISVSDSSSTSTSESLSDSMAQSQSTSTSASGSLSTSISLSMSASAGTLTSQSTSVSTSLSTSDSISDSTSISISGSQSAVESESTSDSTSISDSESLSTSGSTSSSTSTSTSESLSTSNSGSTSVSESLSTSGSGSTSVSDSSSTSSSLSTSGSTSVSDSTSMSESNSASISMSQSISGSTSGSTSISTSESLSMSGSTHNSTSVSDSDSISTSNSGSMSNSIRHFTSLSTSGLMSLSDSNSMSDSDSVSISASESMSASMSDSVSMSDSTSSSMSNSMSMSTSESNSIHPSNSMSTSQTHFTSTSISTSESIAPNTNESQSTLSATSVSSKHDAEPAQSEERLPDTGDSIKQNGLLGGVMTLLVGLGLMKRKKKKDENDQDDSQA

SEQ ID NO: 12714 - protein, 102 aa, Staphylococcus aureus
MTMTDAIVRLIPGVLGNEQSHQDDSFSDGLLEFPQYTRPREFKGLTVPDVLLSGNHANIDAWRHEQKLIRTYNKRPDLIEKYPLTNADKQILERYKIGLKKG

SEQ ID NO: 12715 - protein, 116 aa, Staphylococcus aureus
MTNHKLIEAVTKSQLRTDLPSFRPGDTLRVHVRIIEGTRERIQVFEGVVIKRRGGGVSETFTVRKISSGVGVERTFPLHTPKIEKIEVKRRGKVRRAKLYYLRSLRGKAARIQEIR

SEQ ID NO: 12716 - protein, 290 aa, Staphylococcus aureus
MAGGAAARPFVTHHNALDATLYMRIAIELHLKRLIVGGLEKVYEIGRVFRNEGVSTRHNPEFTMIELYEAYADYHDIMDLTESMVRHIANEVLGSAKVQYNGETIDLESAWTRLHIVDAVKEATGVDFYEVKSDEEAKALAKEHGIEIKDTMKYGHILNEFFEQKVEETLIQPTFIYGHPTEISPLAKKNPEDPRFTDRFELFIVGREHANAFTELNDPIDQKGRFEAQLVEKAQGNDEAHEMDEDYIEALEYGMPPTGGLGIGIDRLVMLLTDSPSIRDVLLFPYMRQK

SEQ ID NO: 12717 - protein, 251 aa, Staphylococcus aureus
MKHQSIVNLKSLNVLPDKNNDWINQRDINYENYLPMYDSKDIENSIYLDQFNGVNSARDNWVTNFSNEKALVNAKLLVDNYNSEIDRLIDILDSRERINLVNKDETFISWTRGLTQKFSKGKNISINPERIVKFMHRPFTKKWIVYDKNIMEMPSRYYNIMENTGQVIYIQGQGMNKEFSAMITDILPNFQFIGNGKGFATYKGKDSLRLVDNISNSFKKKINLNSEEIVYYIYAILHHKYYVNKYSSDLS

SEQ ID NO: 12718 - protein, 182 aa, Staphylococcus aureus; identical to SEQ ID NO: 5853

SEQ ID NO: 12719 - protein, 81 aa, Staphylococcus aureus
MRYTILTKGDSKSNALKHKMMNYMRDFRMIEDSENPEIVISVGGDGTLLQAFHQYSHMLSKVAFGWSSYRSFRILCGLVTS

SEQ ID NO: 12720 - protein, 235 aa, Staphylococcus aureus
MTNDILEIHLPREIPSVNLIPYARKLEVLYEDAFIIIVTKPNNQNCTPSREHPHESLIEQVLYHCQEHGENINPHIVTRLDRNTTGIVIFAKYGHIHHLFSKVNLKKIYTCLVYGKTHTSGIIEANIRRSKDRIITREVASDGKYAKTSYEVINQNDKYSLCKVHLHTGRTHQIRVHFQHIGHPIVGDSLYDGFHDKIHGQVLQCTQIYFVHPINKNNIYITIDYKQLLKLFNQL

SEQ ID NO: 12721 - protein, 321 aa, Staphylococcus aureus; identical to SEQ ID NO: 5771

SEQ ID NO: 12722 - protein, 149 aa, Staphylococcus aureus; identical to SEQ ID NO: 12445

SEQ ID NO: 12723 - protein, 392 aa, Staphylococcus aureus
MLEFEQGFNHLATLKVIGVGGGGNNAVNRMIDHGMNNVEFIAINTDGQALNLSKAESKIQIGEKLTRGLGAGANPEIGKKAAEESREQIEDAIQGADMVFVTSGMGGGTGTGAAPVVAKIAKEMGALTVGVVTRPFSFEGRKRQTQAAAGVEAMKAAVDTLIVIPNDRLLDIVDKSTPMMEAFKEADNVLRQGVQGISDLIAVSGEVNLDFADVKTIMSNQGSALMGIGVSSGENRAVEAAKKAISSPLLETSIVGAQGVLMNITGGESLSLFEAQEAADIVQDAADEDVNMIFGTVINPELQDEIVVTVIATGFDDKPTSHGRKSGSTGFGTSVNTSSNATSKDESFTSNSSNAQATDSVSVRHIQLKKMIFLASLEIEKKDVQEEQDAIG

SEQ ID NO: 12724 - protein, 57 aa, Staphylococcus aureus
MAVKIRLTRLGSKRNPFYRIVVADARSPRDGRIIEQIGTYNPTSANAPEIKVDEALL

SEQ ID NO: 12725 - protein, 267 aa, Staphylococcus aureus; identical to SEQ ID NO: 5909

SEQ ID NO: 12726 - protein, 377 aa, Staphylococcus aureus; identical to SEQ ID NO: 12700

SEQ ID NO: 12727 - protein, 255 aa, Staphylococcus aureus; identical to SEQ ID NO: 5848

SEQ ID NO: 12728 - protein, 199 aa, Staphylococcus aureus
MAFYVFATQNGMIKKRTVPLFKTTRFNKPLIATKVKENDDLISVMRFEKDQLITVITNKGMSLTYNTSELSDTGLRAAGVKSINLKAEDFVVMTEGVSENDTILMATQRGSLKRISFKILQVAKRAQRGITLLKELKKNPHRIVAAHVVTGEHSQYTLYSKSNEEHGLINDIHKSEQYTNGSFIVDTDDFGEVIDMYIS

SEQ ID NO: 12729 - protein, 327 aa, Staphylococcus aureus; identical to SEQ ID NO: 5901

SEQ ID NO: 12730 - protein, 335 aa, Staphylococcus aureus
MSYIIIVTIAVVIFSLIFDFINGFHDTANAVATAVSTRALTPKTAILMAAVMNFIGALTFTGVAGTITKDIVDPFKLENGLVVVLAAILAAIIWNLATWFYGIPSSSSHALIGSIAGAAIASEGSFGVLHYQGFTKIIIVLIVSPIIAFCVGFLMYSIFKVIFKNANLTRANRNFRFFQIFTAALQSFSHGTNDAQKSMGIITLALIVANVQNDGSVEPQLWVKFACATAMGLGTAIGGWKIIKTVGGNIMKIRPANGAAADLSSALTIFVASSLHFPLSTTHVVSSSILGVGASNRAKGVKWSTAQRMIITWVITLPISALLAGLLFYILNLFF

SEQ ID NO: 12731 - protein, 143 aa, Staphylococcus aureus
MILHACILTLIIGGNFMKERGYIEQLWREEKYHVLLHSQQSYQMIRNALKTDLSLHQVQQMIDVALLIEPSIGSVCNAFDHMWGYLKKCANEEERQQSKLLKADFINGKIDTQTLLDFLAELANKYDVQYLLQSRVLNTKRKR

SEQ ID NO: 12732 - protein, 436 aa, Staphylococcus aureus; identical to SEQ ID NO: 12600

SEQ ID NO: 12733 - protein, 402 aa, Staphylococcus aureus
MAQDRKKVLVLGAGYAGLQTVTKLQKAISTEEAEITLINKNEYHYEATWLHEASAGTLNYEDVLYPVESVLKKDKVNFVQAEVTKIDRDAKKVETNQGIYDFDILVVALGFVSETFGIEGMKDHAFQIENVITARELSRHIEDKFANYAASKEKDDNDLSILVGGAGFTGVEFLGELTDRIPELCSKYGVDQNKVKITCVEAAPKMLPMFSEELVNHAVSYLEDRGVEFKIATPIVACNEKGFVVEVDGEKQQLNAGTSVWAAGVRGSKLMEESFEGVKRGRIVTKQDLTINGYDNIFVIGDCSAFIPAGEERPLPTTAQIAMQQGESVAKNIKRILNGESTEEFEYVDRGTVCSLGSHDGVGMVFGKPIAGKKAAFMKKVIDTRAVFKIGGIGLAFKKGKF

SEQ ID NO: 12734 - protein, 692 aa, Staphylococcus aureus
MALLEAFLIFIFAVIISSVINNRFPQIPTAFIQIALGVVIFIIPIQVDFQFNSEVFMFAVIAPLLFVEGTHVSRTKLLEYRKPILLMSMALVFATVVGVGYFIHWIWPALPMPAAFAIAAILCPTDAVAVSAITRGKLLPKGSMTILEGESLLNDAAGIISFKIAVTALVTGTFSLFQAVEQFIISTILGVLIGAIIGFVVVRIRIDLTANKGLKDNNTLTFIQLLTPFVVYFLAEEVHASGIIAVVIAGLIHGLERDRLIRAQTELQMNYHQIWNTFSYALNGFVFVVLGFMIPTVVIDIFQTEPDNFSFLIVITILIAIAIYACRFVWVYFWYKDFYFPKNIQSYLDEEHDSHETPPSRVRYAFIMTMCGIHGTISLSMALTLPFIITKGQAFEYRNDLLFIASFMVLISLILAQIVLPLITPSAEDTTFKGMTYQSAKIFIVQKVIQHFKNESKKDKNDTNYRPVLNQYYGELLFLLNSEPDNQNTKELKRLEDIAQVIETSTLERLIDKGKATYQDINNYRNIVELTETHRTASFVEKFANFFKMLWLRLKAMKHYKALNKESKKQEFENSFKDVQKIMRIVNHNIILRLKEEQNSTNVLEVSLVINHYYDMSRSLKWRAQRRKERQENSNQIIPQAMFHNHKLEALYLQRHLLDELIRKNKINNIVAAQIRENINYNEIVLSLQSKH

SEQ ID NO: 12735 - protein, 160 aa, Staphylococcus aureus
MIYIMPRKGSVPKRDVLPDPIHNSKLVTKLINKIMLDGKRGTAQRILYSAFDLVEQRSVRDALEVFEEAINNIMPVLEVKARRVGGSNYQVPVEVRPERRTTLGLRWLVNYARLRGEKTMEDRLANEILDAANNTGGAVKKREDTHKMAEANKAFAHYRW

SEQ ID NO: 12736 - protein, 715 aa, Staphylococcus aureus; identical to SEQ ID NO: 12443

SEQ ID NO: 12737 - protein, 89 aa, Staphylococcus aureus
MAKKSKIAKERKREELVNKYYELRKELKAKGDYEALRKLPRDSSPTRLTRRCKVTGRPRGVLRKFEMSRIAFREHAHKGQIPGVKKSSW

SEQ ID NO: 12738 - protein, 325 aa, Staphylococcus aureus
MKIFDYEDIQLIPNKCIVESRSECDTTIQFGPKKFKLPVVPANMQTVMNEKLAKWFAENDYFYIMHRFDEEARIPFIKHMQNSGLFASISVGVKKAEFDFIEKLAQEKLIPEYITIDIAHGHSDSVINMIKHIKTHIPDSFVIAGNVGTPEGVRELENAGADATKVGIGPGRVCITKIKTGFGTGGWQLAALNICSKAARKPLIADGGIRTHGDIAKSIRFGASMVMIGSLFAAHEESPGETVELDGKQYKEYFGSASEFQKGEHKNVEGKKMFVEHKGSLMDTLKEMQQDLQSSISYAGGKDLKSLRTVDYVIVRNSIFNGDRD

SEQ ID NO: 12739 - protein, 243 aa, Staphylococcus aureus
MTDKKYTAADMVIDTLKNNGVEYVFGIPGAKIDYLFNALIDDGPELIVTRHEQNAAMMAQGIGRLTGKPGVVLVTSGPGVSNLTTGLLTATSEGDPVLALGGQVKRNDLLRLTHQSIDNAALLKYSSKYSEEVQDPESLSEVMTNAIRIATSGKNGASFISIPQDVISSPVESKAISLCQKPNLGVPSEQDINDVIEAIKNASFPVLLAGMRSSSAEETNAIRKLVERTNLPVVETFQRCRCN

SEQ ID NO: 12740 - protein, 300 aa, Staphylococcus aureus
MGLFRNQVGDELLRKSDLVATIGYDPIEYEASNWNKELETQIINIDEVQAEITNYMQPKKELIGNIAKTIEMISEKVDEPFINQQHLDELEQLRTHIDEETGIKATHEEGILHPVEIIESMQKVLTDDTTVTVDVGSHYIWMARNFRSYNPRHLLFSNGMQTLGVALPWAISAALVRPNTQVVSVAGDGGFLFSSQDLETAVRKNLNIIQLIWNDGKYNMVEFQEEMKYKRSSGVDFGPVDFVKYAESFGAKGLRVTNQEELEAAIKEGYETDGPVLIDIPVNYKDNIKLSTNMLPDVFN

SEQ ID NO: 12741 - protein, 184 aa, Staphylococcus aureus; identical to SEQ ID NO: 5242

SEQ ID NO: 12742 - protein, 293 aa, Staphylococcus aureus
MATISAKLVKELREKTGAGMMDCKKALTETDGDIDKAIDYLREKGIAKAAKKADRIAAEGLVHVETKGNDAVIVEINSETDFVARNEGFQELVKEIANQVLDTKAETVEALMETTLPNGKSVDERIKEAISTIGEKLSVRRFAIRTKTDNDAFGAYLHMGGRIGVLTVVEGSTDEEAARDVAMHIAAINPKYVSSEQVSEEEINHEREVLKQQALNEGKPENIVEKMVEGRLRKYLQEICAVDQDFVKNPDVTVEAFLKTKGGKLVDFVRYEVGEGMEKREENFADEVKGQMK

SEQ ID NO: 12743 - protein, 89 aa, Staphylococcus aureus; identical to SEQ ID NO: 12185

SEQ ID NO: 12744 - protein, 204 aa, Staphylococcus aureus; identical to SEQ ID NO: 12183

SEQ ID NO: 12745 - protein, 57 aa, Staphylococcus aureus
MVMLLKLDRMMKVEDVLTIRFGQKLVTVKVTALNEHASKDNAKGMYEIIEERRLEEA

SEQ ID NO: 12746 - protein, 43 aa, Staphylococcus aureus
MRLDKYLKVSRLIKRRTLAKEVSDQGRITINGNVAKAGSDDES

SEQ ID NO: 12747 - protein, 273 aa, Staphylococcus aureus; identical to SEQ ID NO: 12487

SEQ ID NO: 12748 - protein, 91 aa, Staphylococcus aureus
MAKQATMKNAALKQLTKDADEILHLIKVQLDNLTLPSCPLYEEVLDTQMFGLQKEVDFAVKLGLVDREDGKQIMLRLEKELSKLHEAFTLV

SEQ ID NO: 12749 - protein, 188 aa, Staphylococcus aureus; identical to SEQ ID NO: 12299

SEQ ID NO: 12750 - protein, 130 aa, Staphylococcus aureus; identical to SEQ ID NO: 12607

SEQ ID NO: 12751 - protein, 841 aa, Staphylococcus aureus; identical to SEQ ID NO: 5779

SEQ ID NO: 12752 - protein, 189 aa, Staphylococcus aureus; identical to SEQ ID NO: 5318

SEQ ID NO: 12753 - protein, 299 aa, Staphylococcus aureus; identical to SEQ ID NO: 12571

SEQ ID NO: 12754 - protein, 463 aa, Staphylococcus aureus; identical to SEQ ID NO: 12572

SEQ ID NO: 12755 - protein, 392 aa, Staphylococcus aureus
MRLFTFILSIFIVGMVEMMVAGIMNLMSQDLHVSEAVVGQLVTMYALTFAICGPILVKLTNRFSSRPVLLWTLLIFIIGNGIIAVAPNFSILVVGRIISSAAAALIIVKVLAITAMLSAPKNRGKMIGLVYTGFSGANVFGVPIGTVIGDLVGWRYTFLFLIIVSIIVGFLMMIYLPKDQEIQRGPVNHETPSHENHVTSKILRPAEVAKYLIITFLVLIANSVTFVFINPLILSNGHDMSFVSLALLVNGIAGVIGTSLGGIFSDKITSKRWLMISVSIFIVMMLLMNLILPGSGLLLAGLFIWNIMQWSTNPAVQSGVIQHVEGDTSQVMSWNMSSLNAGIGVGGIIGGLVMTHVSVQAITYTSAIIGALGLIVVFTLKNNHYAKTFKSS

SEQ ID NO: 12756 - protein, 90 aa, Staphylococcus aureus; identical to SEQ ID NO: 5313

SEQ ID NO: 12757 - protein, 91 aa, Staphylococcus aureus; identical to SEQ ID NO: 12242

SEQ ID NO: 12758 - protein, 207 aa, Staphylococcus aureus; identical to SEQ ID NO: 12240

SEQ ID NO: 12759 - protein, 200 aa, Staphylococcus aureus
MLIPVTVVEAKENVVLQKKTVEVDGYNAIQVGFEDKKAYKKDAKSNKYANKPAEGHAKKADAAPKRFIREFRNVDVDAYEVGQEVSVDTFVAGDVIDVTGVSKGKGFQGAIKRHGQSRGPMSHGSHFHRAPGSVGMASDASRVFKGQKMPGRMGGNTVTVQNLEVVQVDTENKVILVKGNVPGPKKGLVEIRTSIKKGNK

SEQ ID NO: 12760 - protein, 105 aa, Staphylococcus aureus
MHIKKGDNVKVIAGKDKGKEGKVIATLPKKDRVVVEGVNIMKKHQKPTQLNPEGGILETEAAIHVSNVQLLDPKTNEPTRVGYKFVDGKKVRIAKKSGEEISSGN

SEQ ID NO: 12761 - protein, 122 aa, Staphylococcus aureus; identical to SEQ ID NO: 5532

SEQ ID NO: 12762 - protein, 77 aa, Staphylococcus aureus; identical to SEQ ID NO: 12214

SEQ ID NO: 12763 - protein, 144 aa, Staphylococcus aureus; identical to SEQ ID NO: 5693

SEQ ID NO: 12764 - protein, 217 aa, Staphylococcus aureus; identical to SEQ ID NO: 12259

SEQ ID NO: 12765 - protein, 117 aa, Staphylococcus aureus; identical to SEQ ID NO: 12258

SEQ ID NO: 12766 - protein, 108 aa, Staphylococcus aureus; identical to SEQ ID NO: 12255

SEQ ID NO: 12767 - protein, 277 aa, Staphylococcus aureus; identical to SEQ ID NO: 5708

SEQ ID NO: 12768 - protein, 366 aa, Staphylococcus aureus; identical to SEQ ID NO: 12345

SEQ ID NO: 12769 - protein, 897 aa, Staphylococcus aureus
MFTQGNGQDFLNQGGILRDKGMANASGFKIDTAYNNVNGKVDKLDADKTNNLSQIGAAKVGYGTFVKNGADGVTNQVGQNALNTKDKPVNKIIYADNTTNHLDGQFHGQRLNDVVLNYDAATSTITATYAGKTWKATTDDLGIDKSQKYNFLITSSHMQNRYSNGIMRTNLEGVTITTPQADLIDDVEVTKQPIPHKTIREFDPTLEPGSPDVIVQKGEDGEKTTTTPTKVDPDTGDVVERGEPTTEVTKNPVDEIVHFAPEEVPQGHKDEFDPNLPIDGTEEVPGKPGIKNPETGKVVTPPVDDVTKHGPKAGEPEVTKEEIPFEKKREFNPDLKPGEEKVTQEGQTGEKTTTTPTTINPLTGEKVGEGEPTTEVTKEPVDEITQFGGEEVPQGHKDEFDPNLPIDGTEEVPGKPGIKNPETGKVVTPPVDDVTKHGPKAGEPEVTKEEIPFEKKREFNPDLKPGEEKVTQEGQTGEKTTTTPTTINPLTGEKVGEGEPTTEVTKEPVDEITQFGGEEVPQGHKDEFDPNLPIDGTEEVPGKPGIKNPETGKVVTPPVDDVTKHGPKAGEPEVTKEEIPYETKRVLDPTMEPGSPDKVAQKGENGEKTTTTPTTINPLTGEKVGEGEPTTEVTKEPIDEIVNYAPEIIPHGTREEIDPNLPEGETKVIPGKDGLKDPETGEIIEEPQDEVIIHGAKDDSDSDADSDSDADSDSDADSDSDSDSDSDADSDSDADSDSDADSDSDADSDSDADSDSDADSDSDADSDSDADSDSDSDSDSDADSDSDADSDSDADSDSDADSDSDADSDSDADSDSDSDSDSDADSDSDADSDSDADSDSDADRDHNDKTDKPNNKELPDTGNDAQNNGTLFGSLIRALGGLFLVGRRRKNKNNEEK

SEQ ID NO: 12770 - protein, 380 aa, Staphylococcus aureus
MKKIVLYGGQFNPIHTAHMIVASEVFHELQPDEFYFLPSFMSPLKKHHDFIDVQHRLTMIQMIIDELGFGDICDDEIKRGGQSYTYDTIKAFKEQHKDSELYFVIGTDQYNQLEKWYQIEYLKEMVTFVVVNRDKNSQNVENAMIAIQIPRVDISSTMIRQRVSEGNLSKFLFLNPLKTILRGKDYMNIEKAKRLAKEKLPEKRYNHSLRVAETAIKLAEIYDGDTSKVELAGVLHDFCKYDDLGKMYQIVRQYELGNDLLSYGSEILHGPVCAAIMEHEYGINDEEVLMAIKYHTTGRQQMTKTEKLIFIADYIEPGRTIPGVDDIRDMAYNQGSLDKTIYEISKRTVLFLIQKDITVYNKTIDCLNYYNYSDERIKDD

SEQ ID NO: 12771 - protein, 309 aa, Staphylococcus aureus; identical to SEQ ID NO: 5359

SEQ ID NO: 12772 - protein, 607 aa, Staphylococcus aureus
MEENVVMCGIVGYIGYDNAKELLLKGLEKLEYRGYDSAGIAVVNDDNTTVFKEKGRIAELRKVADSSDFDGPVGIGHTRWATHGVPNHENSHPHQSSNGRFTLVHNGVIENYEELKGEYLQGVSFISETDTEVIVQLVEYFSNQGLSTEEAFTKVVSLLHGSYALGLLDAEDKDTIYVAKNKSPLLLGVGEGFNVIASDALAMLQVTSEYKEIHDHEIVIVKKDEVIIKDADGNVVERDSYIAEIDASDAEKGVYAHYMLKEIHEQPAVMRRIIQEYQDAEGNLKIDQDIINDVKEADRIYVIAAGTSYHAGLVGKEFLEKWAGVPTEVHVASEFVYNMPLLSEKPLFVYISQSGETADSRAVLVETNKLGHKSLTITNVAGSTLSREADHTLLLHAGPEIAVASTKAYTAQIAVLSILSQIVAKEHGREADIDLLRELAKVTTAIEAIVDDAPIMEQIATDFLETTRNAFFIGRTIDYNVSLEGALKLKEISYIQAEGFAGGELKHGTIALIEEGTPVVGLATQEKVNLSIRGNVKEVVARGAHPCIISMEGLEKEGDTYVIPHVHELLTPLVSVVALQLISYYAALHRDLDVDKPRNLAKSVTVE

SEQ ID NO: 12773 - protein, 188 aa, Staphylococcus aureus; identical to SEQ ID NO: 12426

SEQ ID NO: 12774 - protein, 186 aa, Staphylococcus aureus; identical to SEQ ID NO: 12427

SEQ ID NO: 12775 - protein, 446 aa, Staphylococcus aureus; identical to SEQ ID NO: 5733

SEQ ID NO: 12776 - protein, 321 aa, Staphylococcus aureus; identical to SEQ ID NO: 12150

SEQ ID NO: 12777 - protein, 727 aa, Staphylococcus aureus; identical to SEQ ID NO: 5782

SEQ ID NO: 12778 - protein, 200 aa, Staphylococcus aureus; identical to SEQ ID NO: 5404

SEQ ID NO: 12779 - protein, 325 aa, Staphylococcus aureus; identical to SEQ ID NO: 5783

SEQ ID NO: 12780 - protein, 335 aa, Staphylococcus aureus
MNLAKRILQGEQLTKETVLKIYEDTNIDTLDLLNEAYILRKHYFGKKVKLNMILNAKSGICPENCGYCGQSRDIKQKQRYALIPEEQIIDGAKVAHDNHIGTYCIVMSGRGPSDKEVDHISNTVRTIKSQHPQLKICACLGLTNDEQAKKLKSAGVDRYNHNINTSENYHDNVVTTHSYKDRTDTIELMKANNISPCSGVICGMGESNQDIVDMAFALKEMDADSIPINFLHPIKGTKFGSMDDLTPMKCLRIVALFRLINPTKEIRIAGGREVNLRSLQPLALKAANSIFVGDYLITGGQPNQLDYDMINDLGFEIDYDTCENKENKNEVSRAN

SEQ ID NO: 12781 - protein, 452 aa, Staphylococcus aureus
MNYTQQLKQKDSEYVWHPFTQMGVYSKEEAIIIEKGKGSYLYDTNGNKYLDGYASLWVNVHGHNNKYLNKVIKKQLNKIAHSTLLGSSNIPSIELAEKLIEITPSNLRKVFYSDTGSASVEIAIKMAYQYWKNIDREKYAKKNKFITLNHGYHGDTIGAVSVGGIKTFHKIFKDLIFENIQVESPSFYRSNYDTENEMMTAILTNIEQILIERNDEIAGFILEPLIQGATGLFVHPKGFLKEVEKLCKKYDVLLICDEVAVGFGRTGKMFACNHEDVQPDIMCLGKAITGGYLPLAATLTSKKIYNAFLSDSHGVNTFFHGHTYTGNQIVCTVALENIRLYEKRKLLSHIETTSSTLEKQLHALKRHRNVGDVRGRGLMFGVELVTDKDSKTPLEIEKVERIVRNCKENGLMIRNLENVITFVPVLSMSNKEVKTMVRIFKKAVHNILDRKC

SEQ ID NO: 12782 - protein, 94 aa, Staphylococcus aureus; identical to SEQ ID NO: 12142

SEQ ID NO: 12783 - protein, 226 aa, Staphylococcus aureus; identical to SEQ ID NO: 12455

SEQ ID NO: 12784 - protein, 230 aa, Staphylococcus aureus
MAKKGKKYQEAASKVDRTQHYSVEEAIKLAKETSIANFDASVEVAFRLGIDTRKNDQQIRGAVVLPNGTGKSQSVLVFAKGDKIAEAEAAGADYVGEAEYVQKIQQGWFDFDVVVATPDMMGEVGKLGRVLGPKGLMPNPKTGTVTMDVKKAVEEIKAGKVEYRAEKAGIVHASIGKVSFTDEQLIENFNTLQDVLAKAKPSSAKGTYFKSVAVTTTMGPGVKIDTASFK

SEQ ID NO: 12785 - protein, 143 aa, Staphylococcus aureus; identical to SEQ ID NO: 12451

SEQ ID NO: 12786 - protein, 182 aa, Staphylococcus aureus; identical to SEQ ID NO: 5254

SEQ ID NO: 12787 - protein, 174 aa, Staphylococcus aureus; identical to SEQ ID NO: 12454

SEQ ID NO: 12788 - protein, 292 aa, Staphylococcus aureus; identical to SEQ ID NO: 12437

SEQ ID NO: 12789 - protein, 818 aa, Staphylococcus aureus
MLFGRLTERAQRVLAHAQEEAIRLNHSNIGTEHLLLGLMKEPEGIAAKVLESFNITEDKVIEEVEKLIGHGQDHVGTLHYTPRAKKVIELSMDEARKLHHNFVGTEHILLGLIRENEGVAARVFANLDLNITKARAQVVKALGNPEMSNKNAQASKSNNTPTLDSLARDLTVIAKDGTLDPVIGRDKEITRVIEVLSRRTKNNPVLIGEPGVGKTAIAEGLAQAIVNNEVPETLKDKRVMSLDMGTVVAGTKYRGEFEERLKKVMEEIQQAGNVILFIDELHTLVGAGGAEGAIDASNILKPALARGELQCIGATTLDEYRKNIEKDAALERRFQPVQVDEPSVVDTVAILKGLRDRYEAHHRINISDEAIEAAVKLSNRYVSDRFLPDKAIDLIDEASSKVRLKSHTTPNNLKEIEQEIEKVKNEKDAAVHAQEFENAANLRDKQTKLEKQYEEAKNEWKNAQNGMSTSLSEEDIAEVIAGWTGIPLTKINETESEKLLSLEDTLHERVIGQKDAVNSISKAVRRARAGLKDPKRPIGSFIFLGPTGVGKTELARALAESMFGDDDAMIRVDMSEFMEKHAVSRLVGAPPGYVGHDDGGQLTEKVRRKPYSVILFDEIEKAHPDVFNILLQVLDDGHLTDTKGRTVDFRNTIIIMTSNVGAQELQDQRFAGFGGSSDGQDYETIRKTMLKELKNSFRPEFLNRVDDIIVFHKLTKEELKEIVTMMVNKLTNRLSEQNINIIVTDKAKDKIAEEGYDPEYGARPLIRAIQKTIEDNLSELILDGNQIEGKKVTVDHDGKEFKYDIAEQTSETKTPSQA

SEQ ID NO: 12790 - protein, 238 aa, Staphylococcus aureus
MTHVEVVATIAPQLSIEETLIQKINHRIDAIDVLELRIDQIENVTVDQVAEMITKLKVMQDSFKLLVTYRTKLQGGYGQFTNDSYLNLISDLANINGIDMIDIEWQADIDIEKHQRIITHLQQYNKEVVISHHNFESTPPLDELQFIFFKMQKFNPEYVKLAVMPHNKNDVLNLLQAMSTFSDTMDCKVVGISMSKLGLISRTAQGVFGGALTYGCIGVPQAPGQIDVTDLKAQVTLY

SEQ ID NO: 12791 - protein, 192 aa, Staphylococcus aureus [sequence omitted]

SEQ ID NO: 12792 - protein, 748 aa, Staphylococcus aureus
MMLLGVFQLGIIGRLIDSFFNYLFGYSRYLTYILVLLATGFITYSKRIPKTRRTAGSIVLQIALLFVSQLVFHFNSGIKAEREPVLSYVYQSYQHSHFPNFGGGVLGFYLLELSVPLISLFGVCIITILLLCSSVILLTNHQHREVAKVALENIKAWFGSFNEKMSERNQEKQLKREEKARLKEEQKARQNEQPQIKDVSDFTEVPQERDIPIYGHTENESKSQSQPSRKKRVFDAENSSNNIVNHHQADQQEQLTEQTHNSVESENTIEEAGEVTNVSYVVPPLTLLNQPAKQKATSKAEVQRKGQVLENTLKDFGVNAKVTQIKIGPAVTQYEIQPAQGVKVSKIVNLHNDIALALAAKDVRIEAPIPGRSAVGIEVPNEKISLVSLKEVLDEKFPSNNKLEVGLGRDISGDPITVPLNEMPHLLVAGSTGSGKSVCINGIITSILLNAKPHEVKLMLIDPKMVELNVYNGIPHLLIPVVTNPHKAAQALEKIVAEMERRYDLFQHSSTRNIKGYNELIRKQNQELDEKQPELPYIVVIVDELADLMMVAGKEVENAIQRITQMARAAGIHLIVATQRPSVDVITGIIKNNIPSRIAFAVSSQTDSRTIIGTGGAEKLLGKGDMLYVGNGDSSQTRIQGAFLSDQEVQDVVNYVVEQQQANYVKEMEPDAPVDKSEMKSEDALYDEAYLFVVEQQKASTSLLQRQFRIGYNRASRLMDDLERNQVIGPQKGSKPRQVLIDLNNDEV

SEQ ID NO: 12793 - protein, 449 aa, Staphylococcus aureus; identical to SEQ ID NO: 5474

SEQ ID NO: 12794 - protein, 321 aa, Staphylococcus aureus; identical to SEQ ID NO: 12347

SEQ ID NO: 12795 - protein, 744 aa, Staphylococcus aureus
MAKQKIKIKKNKIGAVLLVGLFGLLFFILVLRISYIMITGHSNGQDLVMKANEKYLVKNAQQPERGKIYDRNGKVLAEDVERYKLVAVIDKKASANSKKPRHVVDKKETAKKLSTVINMKPEEIEKRLSQKKAFQIEFGRKGTNLTYQDKLKIEKMNLPGISLLPETERFYPNGNFASHLIGRAQKNPDTGELKGALGVEKIFDSYLSGSKGSLRYIHDIWGYIAPNTKKEKQPKRGDDVHLTIDSNIQVFVEEALDGMVERYQPKDLFAVVMDAKTGEILAYSQRPTFNPETGKDFGKKWANDLYQNTYEPGSTFKSYGLAAAIQEGAFDPDKKYKSGHRDIMGSRISDWNRVGWGEIPMSLGFTYSSNTLMMHLQDLVGADKMKSWYERFGFGKSTKGMFDGEAPGQIGWSNELQQKTSSFGQSTTVTPVQMLQAQSAFFNDGNMLKPWFVNSVENPVSKRQFYKGQKQIAGKPITKDTAEKVEKQLDLVVNSKKSHAANYRIDGYEVEGKTGTAQVAAPNGGGYVKGPNPYFVSFMGDAPKKNPKVIVYAGMSLAQKNDQEAYELGVSKAFKPIMENTLKYLNVGKSKDDTSNAEYSKVPDVEGQDKQKAIDNVSAKSLEPVTIGSGTQIKAQSIKAGNKVLPHSKVLLLTDGDLTMPDMSGWTKEDVIAFENLTNIKVNLKGSGFVSHQSISKGQKLTEKDKIDVEFSSENVDSNSTNNSDSNSDDKKKSDSKTDKDKSD

SEQ ID NO: 12796 - protein, 311 aa, Staphylococcus aureus; identical to SEQ ID NO: 12344

SEQ ID NO: 12797 - protein, 263 aa, Staphylococcus aureus
MNYLNKIRIENPLTICYTNDVVKNFTANGLLSIGASPAMSEAPEEAEEFYKVAQALLINIGTLTAENEQDIIAIAQTANEAGLPIVFDPVAVGASTYRKQFCKLLLKSAKVSVIKGNASEILALIDDTATMKGTDSDANLDAVAIAKKAYATYKTAIVITGKEDVIVQDNKAFVLANGSPLLARVTGAGCLLGGVIAGFLFRETEPEIEALIEAVSVFNIAAEVAAENENCGGPGTFSPLLLDTLYHLNETTYQQRIRIQEVE

SEQ ID NO: 12798 - protein, 697 aa, Staphylococcus aureus
MQKAFRNVLVIVIIGVIIFGLFSYLNGNGNMPKQLTYNQFTEKLEKGDLKTLEIQPQQNVYMVSGKTKNDEDYSSTILYNNEKELQKITDAAKKQNGVKLTIKEEEKQSVFVSILSTLIPVVVIALLFIFFLSQAQGGGSGGRMMNFGKSKAKMYDNNKRRVRFSDVAGADEEKQELIEIVDFLKDNKKFKEMGSRIPKGVLLVGPPGTGKTLLARAVAGEAGAPFFSISGSDFVEMFVGVGASRVRDLFDNAKKNAPCIIFIDEIDAVGRQRGAGVGGGHDEREQTLNQLLVEMDGFGENEGIIMIAATNRPDILDPALLRPGRFDRQIQVGRPDVKGREAILHVHAKNKPLDETVDLKAISQRTPGFSGADLENLLNEASLIAVREGKKKIDMRDIEEATDRVIAGPAKKSRVISKKERNIVAHHEAGHTIIGMVLDEAEVVHKVTIVPRGQAGGYAMMLPKQDRFLMTEQELLDKICGLLGGRVSEDINFNEVSTGASNDFERATQIARSMVTQYGMSKKLGPLQFGHSNGQVFLGKDMQGEPNYSSQIAYEIDKEVQRIVKEQYERCKQILLEHKEQLILIAETLLTEETLVAEQIQSLFYEGKLPEIDYDAAKVVKDEDSEFNDGKFGKSYEEIRKEQLEDGQRDESEDRKEEKDIAEDKKEADKSDEKDEPAHQQAPNIEKPYDPNHPDNK

SEQ ID NO: 12799 - protein, 293 aa, Staphylococcus aureus; identical to SEQ ID NO: 12145

SEQ ID NO: 12800 - protein, 313 aa, Staphylococcus aureus; identical to SEQ ID NO: 12146

SEQ ID NO: 12801 - protein, 363 aa, Staphylococcus aureus
MKFLKDTSIAEISSILYLIFPIAGIFFNEVYGPKWLYIISVIVFSLSYLILVIVNNRLNTLMFYILLIIHYFIICYFVFSVHPMLSLFFFYSAFAVPFTFKNNVKKTATNLFILTMIICTIITYLLYNNYFVAMMVYYVVISLIMLDNFKKMKNREYQKEIAEKNRHINTLIAEQERHRIGQDLHDTLGHVFASLSLKSELAYKLIDADVEKVKAELLAINKLSRESLNKVREIIDDVKLPSFIEEIDSIRKVLKDADIDFTFENKELAQVLSPTKQSMLVMITREAINNVIKHANASKVHGKLKTVNNHKLLLMIEDDGKGIDSDCEVKSISQRVQHLNGTLAVDSTNGTKIIIEISTGGIA

SEQ ID NO: 12802 - protein, 77 aa, Staphylococcus aureus
MENFDKVKDIIVDRLGVDADKVTEDASFKDDLGADSLDIAELVMELEDEFGTEIPDEEAEKINTVGDAVKFINSLEK

SEQ ID NO: 12803 - protein, 246 aa, Staphylococcus aureus; identical to SEQ ID NO: 5461

SEQ ID NO: 12804 - protein, 557 aa, Staphylococcus aureus
MYRPQSFEDVVGQEHVTKTLRNAISKEKQSHAYIFSGPRGTGKTSIAKVFAKAINCLNSTDGEPCNECHICKGITQGTNSDVIEIDAASNNGVDEIRNIRDKVKYAPSESKYKVYIIDEVHMLTTGAFNALLKTLEEPPAHAIFILATTEPHKIPPTIISRAQRFDFKAISLDQIVERLKFVADAQQIECEDEALAFIAKASEGGMRDALSIMDQAIAFGDGTLTLQDALNVTGSVHDEALDHLFDDIVQGDVQASFKKYHQFITEGKEVNRLINDMIYFVRDTIMNKTSEKDTEYRALMNLELDMLYQMIDLINDTLVSIRFSVNQNVHFEVLLVKLAEQIKGQPQVIANVAEPAQIASSPNTDVLLQRMEQLEQELKTLKAQGVSVAPVQKSSKKPARGIQKSKNAFSMQQIAKVLDKANKADIKLLKDHWQEVIDHAKNNDKKSLVSLLQNSEPVAASEDHVLVKFEEEIHCEIVNKDDEKRSSIESVVCNIVNKNVKVVGVPSDQWQRVRTEYLQNRKNEGDDMPKQQAQQTDIAQKAKDLFGEETVHVIDEE

SEQ ID NO: 12805 - protein, 105 aa, Staphylococcus aureus; identical to SEQ ID NO: 5465

SEQ ID NO: 12806 - protein, 198 aa, Staphylococcus aureus; identical to SEQ ID NO: 5466

SEQ ID NO: 12807 - protein, 142 aa, Staphylococcus aureus; identical to SEQ ID NO: 5805

SEQ ID NO: 12808 - protein, 233 aa, Staphylococcus aureus
MSQAYIGYQLQESLQNELHSIGMDKQVVTLVTQVEVDENDPAFNNPSKPIGLFYNKEEAEQIQKEKGFIFVEDAGRGYRRVVPSPQPISIIELESIKTLIKNDTLVIAAGGGGIPVIREQHDGFKGIDAVIDKDKTSALLGANIQCDQLIILTAIDYVYINFNTENQQPLKTTNVDELKRYIDENQFAKGSMLPKIEAAISFIENNPKGSVLITSLNELDAALEGKVGTVIKK

SEQ ID NO: 12809 - protein, 520 aa, Staphylococcus aureus
MMTLQIHTGGINLKKKNIYSIRKLGVGIASVTLGTLLISGGVTPAANAAQHDEAQQNAFYQVLNMPNLNADQRNGFIQSLKDDPSQSANVLGEAQKLNDSQAPKADAQQNNFNKDQQSAFYEILNMPNLNEAQRNGFIQSLKDDPSQSTNVLGEAKKLNESQAPKADNNFNKEQQNAFYEILNMPNLNEEQRNGFIQSLKDDPSQSANLLSEAKKLNESQAPKADNKFNKEQQNAFYEILHLPNLNEEQRNGFIQSLKDDPSQSANLLAEAKKLNDAQAPKADNKFNKEQQNAFYEILHLPNLTEEQRNGFIQSLKDDPSVSKEILAEAKKLNDAQAPKEEDNNKPGKEDNNKPGKEDNNKPGKEDNNKPGKEDGNKPGKEDNKKPGKEDGNKPGKEDNKKPGKEDGNKPGKEDGNKPGKEDGNGVHVVKPGDTVNDIAKANGTTADKIAADNKLADKNMIKPGQELVVDKKQPANHADANKAQALPETGEENPFIGTTVFGGLSLALGAALLAGRRREL

SEQ ID NO: 12810 - protein, 414 aa, Staphylococcus aureus; identical to SEQ ID NO: 12529

SEQ ID NO: 12811 - protein, 667 aa, Staphylococcus aureus
MADLSSRVNELHDLLNQYSYEYYVEDNPSVPDSEYDKLLHELIKIEEEHPEYKTVDSPTVRVGGEAQASFNKVNHDTPMLSLGNAFNEDDLRKFDQRIREQIGNVEYMCELKIDGLAVSLKYVDGYFVQGLTRGDGTTGEDITENLKTIHAIPLKMKEPLNVEVRGEAYMPRRSFLRLNEEKEKNDEQLFANPRNAAAGSLRQLDSKLTAKRKLSVFIYSVNDFTDFNARSQSEALDELDKLGFTTNKNRARVNNIDGVLEYIEKWTSQRESLPYDIDGIVIKVNDLDQQDEMGFTQKSPRWAIAYKFPAEEVVTKLLDIELSIGRTGVVTPTAILEPVKVAGTTVSRASLHNEDLIHDRDIRIGDSVVVKKAGDIIPEVVRSIPERRPEDAVTYHMPTHCPSCGHELVRIEGEVALRCINPKCQAQLVEGLIHFVSRQAMNIDGLGTKIIQQLYQSELIKDVADIFYLTEEDLLPLDRMGQKKVDNLLAAIQQAKDNSLENLLFGLGIRHLGVKASQVLAEKYETIDRLLTVTEAELVEIHDIGDKVAQSVVTYLENEDIRALIQKLKDKHVNMIYKGIKTSDIEGHPEFSGKTIVLTGKLHQMTRNEASKWLASQGAKVTSSVTKNTDVVIAGEDAGSKLTKAQSLGIEIWTEQQFVDKQNELNS

SEQ ID NO: 12812 - protein, 50 aa, Staphylococcus aureus; identical to SEQ ID NO: 5741

SEQ ID NO: 12813 - protein, 122 aa, Staphylococcus aureus; identical to SEQ ID NO: 12449

SEQ ID NO: 12814 - protein, 1136 aa, Staphylococcus aureus
MFRDISPIEDFTGNLSLEFVDYRLGEPKYDLEESKNRDATYAAPLRVKVRLIIKETGEVKEQEVFMGDFPLMTDTGTFVINGAERVIVSQLVRSPSVYFNEKIDKNGRENYDATIIPNRGAWLEYETDAKDVVYVRIDRTRKLPLTVLLRALGFSSDQEIVDLLGDNEYLRNTLEKDGTENTEQALLEIYERLRPGEPPTVENAKSLLYSRFFDPKRYDLASVGRYKTNKKLHLKHRLFNQKLAEPIVNTETGEIVVEEGTVLDRRKIDEIMDVLESNANSEVFELHGSVIDEPVEIQSIKVYVPNDDEGRTTTVIGNAFPDSEVKCITPADIIASMSYFFNLLSGIGYTDDIDHLGNRRLRSVGELLQNQFRIGLSRMERVVRERMSIQDTESITPQQLINIRPVIASIKEFFGSSQLSQFMDQANPLAELTHKRRLSALGPGGLTRERAQMEVRDVHYSHYGRMCPIETPEGPNIGLINSLSSYARVNEFGFIETPYRKVDLDTHAITDQIDYLTADEEDSYVVAQANSKLDENGRFMDDEVVCRFRGNNTVMAKEKMDYMDVSPKQVVSAATACIPFLENDDSNRALMGANMQRQAVPLMNPEAPFVGTGMEHVAARDSGAAITAKHRGRVEHVESNEILVRRLVEENGVEHEGELDRYPLAKFKRSNSGTCYNQRPIVAVGDVVEYNEILADGPSMELGEMALGRNVVVGFMTWDGYNYEDAVIMSERLVKDDVYTSIHIEEYESEARDTKLGPEEITRDIPNVSESALKNLDDRGIVYIGAEVKDGDILVGKVTPKGVTELTAEERLLHAIFGEKAREVRDTSLRVPHGAGGIVLDVKVFNREEGDDTLSPGVNQLVRVYIVQKRKIHVGDKMCGRHGNKGVISKIVPEEDMPYLPDGRPIDIMLNPLGVPSRMNIGQVLELHLGMAAKNLGIHVASPVFDGANDDDVWSTIEEAGMARDGKTVLYDGRTGEPFDNRISVGVMYMLKLAHMVDDKLHARSTGPYSLVTQQPLGGKAQFGGQRFGEMEVWALEAYGAAYTLQEILTYKSDDTVGRVKTYEAIVKGENISRPSVPESFRVLMKELQSLGLDVKVMDEQDNEIEMTDVDDDDVVERKVDLQQNDAPETQKEVTD

SEQ ID NO: 12815 - protein, 1107 aa, Staphylococcus aureus
MKIGLASPEKIRSWSFGEVKKPETINYRTLKPEKDGLFCERIFGPTKDWECSCGKYKRVRYKGMVCDRCGVEVTKSKVRRERMGHIELAAPVSHIWYFKGIPSRMGLLLDMSPRALEEVIYFASYVVVDPGPTGLEKKTLLSEAEFRDYYDKYPGQFVAKMGAEGIKDLLEEIDLDEELKLLRDELESATGQRLTRAIKRLEVVESFRNSGNKPSWMILDVLPIIPPEIRPMVQLDGGRFATSDLNDLYRRVINRNNRLKRLLDLGAPGIIVQNEKRMLQEAVDALIDNGRRGRPVTGPGNRPLKSLSHMLKGKQGRFRQNLLGKRVDYSGRSVIAVGPSLKMYQCGLPKEMALELFKPFVMKELVQREIATNIKNAKSKIERMDDEVWDVLEEVIREHPVLLNRAPTLHRLGIQAFEPTLVEGRAIRLHPLVTTAYNADFDGDQMAVHVPLSKEAQAEARMLMLAAQNILNPKDGKPVVTPSQDMVLGNYYLTLERKDAVNTGAIFNNTNEVLKAYANGFVHLHTRIGVHASSFNNPTFTEEQNKKILATSVGKIIFNEIIPDSFAYINEPTQENLERKTPNRYFIDPTTLGEGGLKEYFENEELIEPFNKKFLGNIIAEVFNRFSITDTSMMLDRMKDLGFKFSSKAGITVGVADIVVLPDKQQILDEHEKLVDRITKQFNRGLITEEERYNAVVEIWTDAKDQIQGELMQSLDKTNPIFMMSDSGARGNASNFTQLAGMRGLMAAPSGKIIELPITSSFREGLTVLEYFISTHGARKGLADTALKTADSGYLTRRLVDVAQDVIVREEDCGTDRGLLVSDIKEGTEMIEPFIERIEGRYSKETIRHPETDEIIIRPDELITPEIAKKITDAGIEQMYIRSAFTCNARHGVCEKCYGKNLATGEKVEVGEAVGTIAAQSIGEPGTQLTMRTFHTGGVAGSDITQGLPRIQEIFEARNPKGQAVITEIEGVVEDIKLAKDRQQEIVVKGANETRSYLASGTSRIIVEIGQPVQRGEVLTEGSIEPKNYLSVAGLNATESYLLKEVQKVYRMQGVEIDDKHVEVMVRQMLRKVRIIEAGDTKLLPGSLVDIHNFTDANREAFKHRKV

SEQ ID NO: 12816 - protein, 588 aa, Staphylococcus aureus
MSKRTTYCGLVTEAFLGQEITLKGWVNNRRDLGGLIFVDLRDREGIVQVVFNPAFSEEALKIAETVRSEYVVEVQGTVTKRDPETVNPKIKTGQVEVQVTNIKVINKSETPPFSINEENVNVDENIRLKYRYLDLRRQELAQTFKMRHQITRSIRQYLDDEGFFDIETPVLTKSTPEGARDYLVPSRVHDGEFYALPQSPQLFKQLLMISGFDKYYQIVKCFRDEDLRADRQPEFTQVDIEMSFVDQEDVMQMGEEMLKKVVKEVKGVEINGAFPRMTYKEAMRRYGSDKPDTRFEMELIDVSQLGRDMDFKVFKDTVENDGEIKAIVAKGAAEQYTRKDMDALTEFVNIYGAKGLAWVKVVEDGLTGPIGRFFETENVETLLTLTGAEAGDLVMFVADKPNVVAQSLGALRVKLAKELGLIDETKLNFLWVTDWPLLEYDEDAKRYVAAHHPFTSPKEADIAKLGTAPEEAEANAYDIVLNGYELGGGSIRIHDGELQEKMFEVLGFTKEQAQEQFGFLLDAFKYGAPPHGGIALGLDRLVMLLTNRTNLRDTIAFPKTASATCLLTNAPGEVSDKQLEELSLRIRH

SEQ ID NO: 12817 - protein, 420 aa, Staphylococcus aureus; identical to SEQ ID NO: 5343

SEQ ID NO: 12818 - protein, 242 aa, Staphylococcus aureus; identical to SEQ ID NO: 5439

SEQ ID NO: 12819 - protein, 146 aa, Staphylococcus aureus; identical to SEQ ID NO: 12390

SEQ ID NO: 12820 - protein, 421 aa, Staphylococcus aureus
MDKIVIKGGNKLTGEVKVEGAKNAVLPILTASLLASDKPSKLVNVPALSDVETINNVLTTLNADVTYKKDENAVVVDATKTLNEEAPYEYVSKMRASILVMGPLLARLGHAIVALPGGCAIGSRPIEQHIKGFEALGAEIHLENGNIYANAKDGLKGTSIHLDFPSVGATQNIIMAASLAKGKTLIENAAKEPEIVDLANYINEMGGRITGAGTDTITINGVESLHGVEHAIIPDRIEAGTLLIAGAITRGDIFVRDAIKEHMASLVYKLEEMGVELDYQEDGIRVRAEGELQPVDIKTLPHPGFPTDMQSQMMALLLTANGHKVVTETVFENRFMHVAEFKRMNANINVEGRSAKLEGKSQLQGAQVKATDLRAAAALILAGLVADGKTSVTELTHLDRGYVDLHGKLKQLGADIERIND

SEQ ID NO: 12821 - protein, 502 aa, Staphylococcus aureus; identical to SEQ ID NO: 5441

SEQ ID NO: 12822 - protein, 173 aa, Staphylococcus aureus; identical to SEQ ID NO: 12386

SEQ ID NO: 12823 - protein, 72 aa, Staphylococcus aureus; identical to SEQ ID NO: 5543

SEQ ID NO: 12824 - protein, 224 aa, Staphylococcus aureus; identical to SEQ ID NO: 12227

SEQ ID NO: 12825 - protein, 430 aa, Staphylococcus aureus; identical to SEQ ID NO: 12226

SEQ ID NO: 12826 - protein, 146 aa, Staphylococcus aureus; identical to SEQ ID NO: 5540

SEQ ID NO: 12827 - protein, 59 aa, Staphylococcus aureus; identical to SEQ ID NO: 5539

SEQ ID NO: 12828 - protein, 166 aa, Staphylococcus aureus; identical to SEQ ID NO: 12222

SEQ ID NO: 12829 - protein, 119 aa, Staphylococcus aureus; identical to SEQ ID NO: 5537

SEQ ID NO: 12830 - protein, 178 aa, Staphylococcus aureus; identical to SEQ ID NO: 12220

SEQ ID NO: 12831 - protein, 132 aa, Staphylococcus aureus; identical to SEQ ID NO: 5536

SEQ ID NO: 12832 - protein, 268 aa, Staphylococcus aureus
MKNKLIIGRYLPINSFVHHLDPRAKLMFVFLFIILIFFCHSPLTYLWVFALILFIMRLAKIQLWFLIKGLTPIFFFLIFTLMMHIFLTKGGYVLVEWHGITIETNGILEGLYISLRLIGIVMIATIMTLSTSPIDLTDAFERLLAPLKMFKLPVHQLSMIMSIALRFIPTLMDELDKIILAQKSRGSEISSGNIATRIKSFIPLLVPLFISAFQRAEELAVAMEVRGYDANVKRTSYRQLKWQLRDTISLTMIIPIAIILFVLKYSGV

SEQ ID NO: 12833 - protein, 122 aa, Staphylococcus aureus; identical to SEQ ID NO: 5548

SEQ ID NO: 12834 - protein, 314 aa, Staphylococcus aureus; identical to SEQ ID NO: 5547

SEQ ID NO: 12835 - protein, 129 aa, Staphylococcus aureus; identical to SEQ ID NO: 12230

SEQ ID NO: 12836 - protein, 121 aa, Staphylococcus aureus; identical to SEQ ID NO: 5545

SEQ ID NO: 12837 - protein, 517 aa, Staphylococcus aureus
MKYMIGVDIGTTSTKSVLYDENGTFIMKHQIGYDLHTPNVDVSEENPDELFDAVLMTIKYVMRESKVNKDDIKFVSFSAQMHSLIAMDQQHQRLTNNITWADNRAAKYATVINEVHDGNAIYQRTGTPIHPMSPLAKIFWMKHEWQDVFQRTAKFADIKTYIFYHLFDTYIIDYSMASATGMFNLETLDWDVEALELLGISKEMLPELVPTTYVMKGMKERYATLMGLNKDTPFVIGASDGVLSNLGVNSVGKGEVAVTIGTSGAIRTVIDKPRTDYQGRIFCYVLAEDHYVIGGPVNNGGVVLRWLRDELLASEVETAKRLGVDPYDVLTQIAKRVKPGADGLIFHPYLAGERAPLWNANARGSFFGLTLSHKKEHMIRAALEGVLYNLYTVYLALIEVMNETPKMIKATGGFAKSEVWRQMMSDIFDTELVVPESYESSCLGACVLGLKAVGDIEDFSIVSSMVGATNNHTPIEENVTVYQEIVSIFINLSRSLTENYEQIADFQRQHIAENKTQ

SEQ ID NO: 12838 - protein, 1018 aa, Staphylococcus aureus
MKNNLRYGIRKHKLGAASVFLGTMIVVGMGQDKEAAASEQKTTTVEENGNSATDNKTSETQTTATNVNHIEETQSYNATVTEQPSNATQVTTEEAPKAVQAPQTAQPANIETVKEEVVKEEAKPQVKETTQSQDNSGDQRQVDLTPKKATQNQVAETQVEVAQPRTASESKPRVTRSADVAEAKEASNAKVETGTDVTSKVTVEIGSIEGHNNTNKVEPHAGQRAVLKYKLKFENGLHQGDYFDFTLSNNVNTHGVSTARKVPEIKNGSVVMATGEVLEGGKIRYTFTNDIEDKVDVTAELEINLFIDPKTVQTNGNQTITSTLNEEQTSKELDVKYKDGIGNYYANLNGSIETFNKANNRFSHVAFIKPNNGKTTSVTVTGTLMKGSNQNGNQPKVRIFEYLGNNEDIAKSVYANTTDTSKFKEVTSNMSGNLNLQNNGSYSLNIENLDKTYVVHYDGEYLNGTDEVDFRTQMVGHPEQLYKYYYDRGYTLTWDNGLVLYSNKANGNGKNGPIIQNNKFEYKEDTIKETLTGQYDKNLVTTVEEEYDSSTLDIDYHTAIDGGGGYVDGYIETIEETDSSAIDIDYHTAVDSEAGHVGGYTESSEESNPIDFEESTHENSKHHADVVEYEEDTNPGGGQVTTESNLVEFDEESTKGIVTGAVSDHTTVEDTKEYTTESNLIELVDELPEEHGQAQGPVEEITENNHHISHSGLGTENGHGNYDVIEEIEENSHVDIKSELGYEGGQNSGNQSFEEDTEEDKPKYEQGGNIVDIDFDSVPQIHGQNKGNQSFEEDTEKDKPKYEHGGNIIDIDFDSVPHIHGFNKHTEIIEEDTNKDKPSYQFGGHNSVDFEEDTLPKVSGQNEGQQTIEEDTTPPIVPPTPPTPEVPSEPETPTPPTPEVPSEPETPTPPTPEVPSEPETPTPPTPEVPAEPGKPVPPAKEEPKKPSKPVEQGKVVTPVIEINEKVKAVAPTKKPQSKKSELPETGGEESTNKGMLFGGLFSILGLALLRRNKKNHKA

SEQ ID NO: 12839 - protein, 64 aa, Staphylococcus aureus; identical to SEQ ID NO: 5476

SEQ ID NO: 12840 - protein, 154 aa, Staphylococcus aureus; identical to SEQ ID NO: 12551

SEQ ID NO: 12841 - protein, 253 aa, Staphylococcus aureus; identical to SEQ ID NO: 12550

SEQ ID NO: 12842 - protein, 423 aa, Staphylococcus aureus
MRIIRHIFYEEGEMIMLSIKHLTKIYSGNKKAVDDISLDIQSGEFIAFIGTSGSGKTTALRMINRMIEATEGQIEIDGKDVRSMNPVELRRNIGYVIQQIGLMPHMTIKENIVLVPKLLKWTKEEKDKRAKELIKLVDLPESFLERYPAELSGGQQQRIGVVRALAAEQDIILMDEPFGALDPITRDTLQDLVKTLQRKLGKTFIFVTHDMDEAIKLADKICIMSEGKVVQFDTPDNILRHPANDFVRDFIGQNRLIQDRPNDKTVEGVMIKPITIQAEATLNDAVHIMRQKRVDAIFVVDSNNHLLGFLDIEDINQGIRGHKSLRDTMQQHIYTVQIDSKLQDSVRTILKRNVRNVPVVDDQQRLVGLITRANVVDIVYDTIWGDSEDTVQTEHVGEDTASSKVHEQHTTNVKVRDIGDDKS

SEQ ID NO: 12843 - protein, 44 aa, Staphylococcus aureus
MKYSLDFLGATLNGYIIGTAEKPGDIMKDNYALARATEWNSILQ

SEQ ID NO: 12844 - protein, 459 aa, Staphylococcus aureus
MENNELQRGLSARQIQMIALGGTIGVGLFMGATSTIKWTGPSVILAYLIAGIFLFLIMRAMGEMIYLNPTTGSFATFASDYIHPAAGYMTAWSNIFQWIVVGMSEVIAVGEYMKFWFPELPTWIPGVIAILLLMAANLFSVKAFGEFEFWFALIKVVTIILMIIAGFGLIFFGFGNGGHAVGISNLWTNGGFMPNGIVGFFFALSIVIGSYQGVELIGITAGETKDPQKNIVKAVNGVIWRILIFYLGAIFVIVSVYPWNQLGDIGSPFVATFAKIGITFAAGLINFVVLTAAMSGCNSGIFSASRMIYTLAHKGEMPKIFTKIMRNGVPLYTVVAVSLGILIGALLNVILPLYIDGAKSIFVYVYSASILPGMIPWFMILFSHLRFRKLHPEELEGHPFKMPGGAVTNYLTILFLILVLVGMVFNVETRISVLIGVIFLTIVTIYYFIRYNKNNVKAK

SEQ ID NO: 12845 - protein, 421 aa, Staphylococcus aureus
MEKMHITNQEHDAFVKSHPNGDLLQLTKWAETKKLTGWYARRIAVGRDGEVQGVAQLLFKKVPKLPYTLCYISRGFVVDYSNKEALNALLDSAKEIAKAEKAYAIKIDPDVEVDKGTDALQNLKALGFKHKGFKEGLSKDYIQPRMTMITPIDKNDDELLNSFERRNRSKVRLALKRGTTVERSDREGLKTFAELMKITGERDGFLTRDISYFENIYDALHEDGDAELFLVKLDPKENIAKVNQELNELHAEIAKWQQKMKTSEKQAKKAQNMINDAQNKIAKNEDLKRDLEALEKEHPEGIYLSGALLMFAGSKSYYLYGASSNEFRDFLPNHHMQYTMMKYAREHGATTYDFGGTDNDPDKDSEHYGLWAFKKVWGTYLSEKIGEFDYVLNQPLYQLIEQVKPRLTKAKIKISRKLKRK

SEQ ID NO: 12846 - protein, 436 aa, Staphylococcus aureus; identical to SEQ ID NO: 5800

SEQ ID NO: 12847 - protein, 318 aa, Staphylococcus aureus; identical to SEQ ID NO: 12191

SEQ ID NO: 12848 - protein, 157 aa, Staphylococcus aureus; identical to SEQ ID NO: 5855

SEQ ID NO: 12849 - protein, 329 aa, Staphylococcus aureus; identical to SEQ ID NO: 12532

SEQ ID NO: 12850 - protein, 326 aa, Staphylococcus aureus
MENILEVNQIKKYYKIKTGLLQKTQYVKAVDDVSFSIKKGQTFGLVGESGCGKSTLGKVIIRLEDATSGSIIVNGEDITRLQGKKLRKSRQQYQMIFQDPYASLNPMQMVGDIISEPILNYKKLPKEEIKKEVLYLLKCVGLSEDAYYKYAHEFSGGQRQRVGIARALALRPSLIVADEPVSALDVSVQSQVLNLLKDLQEQFNLSYLFIAHDLSVVKHISDVIGVMYLGHIVEIASDKEIYENPKHPYTKALISSIPQIDKHNNNRIILKGELPSPSNPPQGCPFHTRCPIAQDMCKKSMPELKDIGNEHQVACFYVDKVGDLND

SEQ ID NO: 12851 - protein, 488 aa, Staphylococcus aureus
MAMSNNFKDDFEKNRQSIDTNSHQDHTEDVEKDQSELEHQDTIENTEQQFPPRNAQRRKRRRDLATNHNKQVHNESQTSEDNVQNEAGTIDDRQVESSHSTESQEPSHQDSTPQHEEEYYNKNAFAMDKSHPEPIEDNDKHDTIKNAENNTEHSTVSDKSEAEQSQQPKPYFTTGANQSETSKNEHDNDSVKQDQDEPKEHHNGKKAAAIGAGTAGVAGAAGAMAASKAKKHSNDAQNKSNSGKANNSTEDKASQDKSKDHHNGKKGAAIGAGTAGLAGGAASKSASAASKPHASNNASQNHDEHDNHDRDKERKKGGMAKVLLPLIAAVLIIGALAIFGGMALNNHNNGTKENKIANTNKNNADESKDKDTSKDASKDKSKSTDSDKSKEDQDKATKDESDNDQNNANQANNQAQNNQNQQQANQNQQQQQQRQGGGQRHTVNGQENLYRIAIQYYGSGSPENVEKIRRANGLSGNNIRNGQQIVIP

SEQ ID NO: 12852 - protein, 172 aa, Staphylococcus aureus; identical to SEQ ID NO: 12613

SEQ ID NO: 12853 - protein, 356 aa, Staphylococcus aureus; identical to SEQ ID NO: 12614

SEQ ID NO: 12854 - protein, 159 aa, Staphylococcus aureus; identical to SEQ ID NO: 5421

SEQ ID NO: 12855 - protein, 237 aa, Staphylococcus aureus
MAKLNVEVFADGADIEEMKAAYKNKQVDGFTTNPSLMAKAGVTDYKAFAEEAVKEIPDASISFEVFADDLETMEKEAAILKQYGENVFVKIPIVNTRGESTIPLIKKLSADNVRLNVTAVYTIEQVKEITEAVTEGVPTYVSVFAGRIADTGVDPLPLMKEAVKVTHSKDGVKLLWASCRELFNVIQADEIGADIITCPADVVKKVNTNLGRDINELSVDTVKGFAKDIQSSGLSIL

SEQ ID NO: 12856 - protein, 431 aa, Staphylococcus aureus; identical to SEQ ID NO: 12281

SEQ ID NO: 12857 - protein, 323 aa, Staphylococcus aureus; identical to SEQ ID NO: 12514

SEQ ID NO: 12858 - protein, 181 aa, Staphylococcus aureus; identical to SEQ ID NO: 12311

SEQ ID NO: 12859 - protein, 435 aa, Staphylococcus aureus
MTQTVNVIGAGLAGSEAAYQLAERGIKVNLIEMRPVKQTPAHHTDKFAELVCSNSLRGNALTNGVGVLKEEMRRLNSIIIEAADKARVPAGGALAVDRNDFSGYITETLKNHENITVINEEINAIPDGYTIIATGPLTTETLAQEIVDITGKDQLYFYDAAAPIIEKESIDMDKVYLKSRYDKGEAAYLNCPMTEDEFNRFYDAVLEAEVAPVNSFEKEKYFEGCMPFEVMAERGRKTLLFGPMKPVGLEDPKTGKRPYAVVQLRQDDAAGTLYNIVGFQTHLKWGAQKEVIKLIPGLENVDIVRYGVMHRNTFINSPDVLNEKYELISQPNIQFAGQMTGVEGYVESAASGLVAGINLAHKILGKGEVVFPRETMIGSMAYYISHAKNNKNFQPMNANFGLLPSLETRIKDKKERYEAQANRALDYLENFKKTL

SEQ ID NO: 12860 - protein, 414 aa, Staphylococcus aureus
MKFSTLSEEEFTNYTKKHFKHYTQSIELYNYRNKINHEAHIVGVKNDKNEVIAACLLTEARIFKFYKYFYSHRGPLLDYFDAKLVCYFFKELSKFIYKNRGVFILVDPYLIENLRDANGRIIKNYNNSVIVKMLGKIGYLHQGYTTGYSNKSQIRWISVLDLKDKDENQLLKEMEYQTRRNIKKTIEIGVKVEDLSIEETNRFYKLFQMAEEKHGFHFMNEDYFKRMQEIYKDKAMLKIACINLNEYQDKLKIQLLKIENEMMTVNRALNENPNSKKNKSKLNQLNMQLSSINNRISKTEELIFEDGPVLDLAAALFICTDDEVYYLSSGSNPKYNQYMGAYHLQWHMIKYAKSHNINRYNFYGITGVFSNEADDFGVQQFKKGFNAHVEELIGDFIKPVRPILYKFAKLIYKV

SEQ ID NO: 12861 - protein, 302 aa, Staphylococcus aureus; identical to SEQ ID NO: 12336

SEQ ID NO: 12862 - protein, 315 aa, Staphylococcus aureus
MRKRARIIYNPTSGKELFKRELPDALIKLEKAGYETSAYATEKIGDATLEAERAMHENYDVLIAAGGDGTLNEVVNGIAEKPNRPKLGVIPMGTVNDFGRALHIPNDIMGALDVIIEGHSTKVDIGKMNNRYFINLAAGGQLTQVSYETPSKLKSIVGPFAYYIKGFEMLPQMKAVDLRIEYDGNVFQGEALLFFLGLTNSMAGFEKLVPDAKLDDGYFTLIIVEKSNLAELGHIMTLASRGEHTKHPKVIYEKAKAINISSFTDLQLNVDGEYGGKLPANFLNLERHIDVFAPNDIVNEELINNDHVDDNLIEE

SEQ ID NO: 12863 - protein, 478 aa, Staphylococcus aureus; identical to SEQ ID NO: 12493

SEQ ID NO: 12864 - protein, 491 aa, Staphylococcus aureus
MRRTRKMSIRYESVENLLTLIKDKKIKPSDVVKDIYDAIEETDPTIKSFLALDKENAIKKAQELDELQAKDQMDGKLFGIPMGIKDNIITNGLETTCASKMLEGFVPIYESTVMEKLHNENAVLIGKLNMDEFAMGGSTETSYFKKTVNPFDHKAVPGGSSGGSAAAVAAGLVPFSLGSDTGGSIRQPAAYCGVVGMKPTYGRVSRFGLVAFASSLDQIGPLTRNVKDNAIVLEAISGADVNDSTSAPVDDVDFTSEIGKDIKGLKVALPKEYLGEGVADDVKEAVQNAVETLKSLGAVVEEVSLPNTKFGIPSYYVIASSEASSNLSRFDGIRYGYHSKEAHSLEELYKMSRSEGFGKEVKRRIFLGTFALSSGYYDAYYKKSHKVRTLIKNDFDKVFENYDVVVGPTAPTTAFNLGEEIDDPLTMYANDLLTTPVNLAGLPGISVPCGQSNGRPIGLQFIGKPFDEKTLYRVAYQYETQYNLHDVYEKL

SEQ ID NO: 12865 - protein, 100 aa, Staphylococcus aureus; identical to SEQ ID NO: 12491

SEQ ID NO: 12866 - protein, 358 aa, Staphylococcus aureus
MIQVKAPGKLYIAGEYAVTEPGYKSVLIALDRFVTATIEETDQYKGTIHSKALHHNPVTFSRDEDSIVISDPHAAKQLNYVVTAIEIFEQYAKSCDIAMKHFHLTIDSNLDDSNGHKYGLGSSAAVLVSVIKVLNEFYDMKLSNLYIYKLAVIANMKLQSLSSCGDIAVSVYSGWLAYSTFDHEWVKHQIEDTTVEEVLIKNWPGLHIEPLQAPENMEVLIGWTGSPASSPHFVSEVKRLKSDPSFYGDFLEDSHRCVEKLIHAFKTNNIKGVQKMVRQNRTIIQRMDKEATVDIETEKLKYLCDIAEKYHGASKTSGAGGGDCGITIINKDVDKEKIYDEWTKHGIKPLKFNIYHGQ

SEQ ID NO: 12867 - protein, 117 aa, Staphylococcus aureus; identical to SEQ ID NO: 12433

SEQ ID NO: 12868 - protein, 505 aa, Staphylococcus aureus; identical to SEQ ID NO: 5857

SEQ ID NO: 12869 - protein, 519 aa, Staphylococcus aureus; identical to SEQ ID NO: 12331

SEQ ID NO: 12870 - protein, 265 aa, Staphylococcus aureus
MRIMFIGDIVGKIGRDAIETYIPQLKQKYKPTVTIVNAENAAHGKGLTEKIYKQLLRNGVDFMTMGNHTYGQREIYDFIDEAKRLVRPANFPDEAPGIGMRFIQINDIKLAVINLQGRAFMPDIDDPFKKADQLVKEAQEQTPFIFVDFHAETTSEKYAMGWHLDGRASAVVGTHTHIQTADERILPKGTGYITDVGMTGFYDGILGINKTEVIERFITSLPQRHVVPNEGRSVLSGVVIDLDKEGKTKHIERILINDDHPFSTF

SEQ ID NO: 12871 - protein, 269 aa, Staphylococcus aureus
MLMKYFEKRWECMKAHKIFWLNLAAIIIISIVVSGDMFLAMKWEQIHLKDGLKKVLSTYPIKNLETLYEIDGHDNPHYENNDQDTWYIESSYSVVGSDELLKEDRMLLKVDKNTHKITGEYDTTTNDKKNATDSTYKSYPVKVVNNKIVFTKDVKDPALKQKIENNQFLIQSGDLTSILNSNDLKVTHDPTTDYYNLSGKLSNDNPNVKQLKRRYNIPKNASTKVELKGMSDLKGNNHQDQKLYFYFSSPGKDQIIYKESLTYNKISEH

SEQ ID NO: 12872 - protein, 331 aa, Staphylococcus aureus; identical to SEQ ID NO: 5912

SEQ ID NO: 12873 - protein, 265 aa, Staphylococcus aureus; identical to SEQ ID NO: 12297

SEQ ID NO: 12874 - protein, 271 aa, Staphylococcus aureus; identical to SEQ ID NO: 12298

SEQ ID NO: 12875 - protein, 132 aa, Staphylococcus aureus; identical to SEQ ID NO: 5399

SEQ ID NO: 12876 - protein, 337 aa, Staphylococcus aureus; identical to SEQ ID NO: 12539

SEQ ID NO: 12877 - protein, 314 aa, Staphylococcus aureus; identical to SEQ ID NO: 5616

SEQ ID NO: 12878 - protein, 302 aa, Staphylococcus aureus
MIMKQYLITGGTGMVGSQLVNEIKKSDSHITILTRHDQISNDKKISYVNWAKSGWEHKVPQNIDVVINLAGATLNKRWTPEYKQTLMLSRIQSTQALYELFKSRNKAPKALFNASATGYYPPDLFMSYTEVYKTLPFDFLSDIVYQWERFAQQFEQLGTRVVIGRFGIILSNEGGALQTMKLPYEYYIGGKLGSGQQWYSWIHINDLIQAILFLINNESASGPFNLTAPIPERQNLFGYTLARAMHKPHETWAPSLAMRLILGQMSTVVLDTQKVLPNKIQALGFQFKYSNLKMALEDLIKE

SEQ ID NO: 12879 - protein, 152 aa, Staphylococcus aureus; identical to SEQ ID NO: 12642

SEQ ID NO: 12880 - protein, 99 aa, Staphylococcus aureus; identical to SEQ ID NO: 12640

SEQ ID NO: 12881 - protein, 106 aa, Staphylococcus aureus; identical to SEQ ID NO: 12639

SEQ ID NO: 12882 - protein, 105 aa, Staphylococcus aureus; identical to SEQ ID NO: 12638

SEQ ID NO: 12883 - protein, 384 aa, Staphylococcus aureus; identical to SEQ ID NO: 12644

SEQ ID NO: 12884 - protein, 354 aa, Staphylococcus aureus
MNILQSRMRRENNVNIEEFDYDLPESLIAQTPLKDRDHSRLLVMDRETGEMKHLHFKDIIEYFRPGDTLVLNDTRVMPARLFGLKEETGAKVEMLMLTQIEGNDWEVLLKPAKRIKVGNKLNFGNGKIIAECIKEMDQGGRIMRLHYEGILQERLDELGEMPLPPYIKERLDDPDRYQTVYAKESGSAAAPTAGLHFTDELLIEIKNKGVNIAFVTLHVGLGTFRPVSVDDVNDHEMHSEYYQMTQETADLLNDTKSKGHRIISVGTTSTRTLETIRRDHDKFVETSGWTNIFIYPGFDFKAIDGQITNFHLPKSTLVMLVSAFSSRENVLNAYKTAVNLEYRFFSFGDAMLII

SEQ ID NO: 12885 - protein, 151 aa, Staphylococcus aureus; identical to SEQ ID NO: 12655

SEQ ID NO: 12886 - protein, 637 aa, Staphylococcus aureus; identical to SEQ ID NO: 5858

SEQ ID NO: 12887 - protein, 220 aa, Staphylococcus aureus
MTMKNAFKLFKMDLKKVAKTPAVWIILAGLAILPSFYAWFNLWAMWDPYGNTGHIKVAVVNEDKGDTIRGKKVNVGNTMVNTLKKNKSFDWQFVSREKADHEIKMGKYFAGIYIPSKFTHEITGTLRKQPQKADVEFKVNQKINAVASKLTDTGSSVVVEKANEQFNKTVTRALLEEANKAGLTIEENVPTINKITNAGYSADKALPKINDFANRICIFE

SEQ ID NO: 12888 - protein, 722 aa, Staphylococcus aureus
MPKIEKALNFAADDVPAQFPKINQGLNIASQGIDQANGQLNDAKGFVTQVRSRVGDYQDAIRRAQDLNRRNQQQIPQNSAANNETSNSAPAAGNGVASTPPSAPSGDTAPNNNVTQNTAPNSNNAPVSTTPQSTSGKKDGQSFVDITTTQVSTANENTQNITDKDVKSMEAALTGSLLSLSNNLDTQAKAAQKDSQALRNISYGILASDKPSDFRESLDNVKSGLEYTTQYNQQFIDTLKEIEKNENVDLSKEIDKVKAANNRINESLRLVNQLSNALKNGSSGTAEATKLLDQLSKLDSSLSSFRDYVKKDLNSSLVSISQRIMDELNKGQTALSNVQSKLNTIDQVINSGQAILKNGKTRIDRLQTVLPSIEQQYISAVKNAQANFSKVKSDVAKAANFVRNDLPQLEQRLTNATASVNKNLPTLLNGYDQAVGLLNKNQPQAKKALSDLADFSQNKLPDVEKDLKKANKIFKKLDKDDAVDKLIDTLKNDLKKQAGIIANPINKKTVDVFPVKDYGSGMTPFYTALSVWVGALLMVSLLTVDNKHKSLESVLTTRQVFLGKAGFFIMLGMLQALIVSVGDLLILKAGVESPVLFVLITIFCSIIFNSIVYTCVSLLGNPGKAIAIVLLVLQIAGGGGTFPIQTTPQFFQNISPYLPFTYAIDSLRETVGGIVPEILITKLIILTLFGIGFFVVGLILKPVTDPLMKRVSEKVDQSNVTE

SEQ ID NO: 12889 - protein, 312 aa, Staphylococcus aureus
MALFLQPVFKDRIWGGHALKAFNYDIPNETTGECWAISAHPNGPNTIINGPYKDMTLDQLWSQHRELFDNDSRDSFPLLTKVLDANDKLSVQVHPDDDYALKHEGELGKTECWYILDAAPGAEIIYGVHAHNKQTLIDMIDNHEFDSLFKRIPVKPGDFYYVPAGTVHAIGSGILILETQQSSDTTYRIYDYDRRDQNGQLRDLHLEQSKDVIELGNHEPNTTPITTHIDTHTVTQFVDNQYFAVYKWDIHGDLKFNKPHAYCLVTIIDGTGTLTVNDKHYDIQKGSSFILTTEDEDIHFVGNISAIVSHPG

SEQ ID NO: 12890 - protein, 327 aa, Staphylococcus aureus; identical to SEQ ID NO: 12155

SEQ ID NO: 12891 - protein, 429 aa, Staphylococcus aureus
MVNKEQSLPANVTQVVVPDTLRVASILAHTLYDYPSHQLVTFGVTGTNGKTSIATMIHLIQRKLQKNSAYLGTNGFQINETKTKGANTTPETVSLTKKIKEAVDAGAESMTLEVSSHGLVLGRLRGVEFDVAIFSNLTQDHLDFHGTMEAYGHAKSLLFSQLGEDLSKEKYVVLNNDDSFSEYLRTVTPYEVFSYGIDEEAQFMAKNIQESLQGVSFDFVTPFGTYPVKSPYVGKFNISNIMAAMIAVWSKGTSLETIIKAVENLEPVEGRLEVLDPSLPIDLIIDYAHTADGMNKLIDAVQPFVKQKLIFLVGMAGERDLTKTPEMGRVACRADYVIFTPDNPANDDPKMLTAELAKGATHQNYIEFDDRAEGIKHAIDIAEPGDTVVLASKGREPYQIMPGHIKVPHRDDLIGLEAAYKKFGGGPVD

SEQ ID NO: 12892 - protein, 256 aa, Staphylococcus aureus; identical to SEQ ID NO: 5228

SEQ ID NO: 12893 - protein, 262 aa, Staphylococcus aureus; identical to SEQ ID NO: 5860

SEQ ID NO: 12894 - protein, 265 aa, Staphylococcus aureus; identical to SEQ ID NO: 5859

SEQ ID NO: 12895 - protein, 196 aa, Staphylococcus aureus
MIEEPVDDVIKHGPKTGTPETKTVEIPFETKREFNPKLQPGEERVKQEGQPGSKTITTPITVNPLTGEKVGEGQPTEEITKQPVDKIVEFGGEKPKDPKGPENPEKPSRPTHPSGPVNPNNPGLSKDRAKPNGPVHSMDKNDKVKKSKIAKESVANQEKKRAELPKTGLESTQKGLIFSSIIGIAGLMLLARRRKN

SEQ ID NO: 12896 - protein, 602 aa, Staphylococcus aureus
MHFHTHLLYNTCEKYCLGAVFFYFWGVFLYNSLHKCKGFSFHVLLSLTEILKGCLATMDKELWIERANDSLVKHFYEQQSDIEQREGFESKLTFGTAGIRGKFGLGEGRLNKFTIEKLALGLARYLNAQTNSPTIVIHYDIRHLSTEFAQIIANVLANHQITVYLPDTYKTTPELSFAVRNLNTTAGIMITASHNPKDYNGIKVYGSDGAQLSTDASELASRYIEEVGDPLQIDIPISKQNTSYIKPFPKSVTDDYMKHIQNMIGYIPKSDLQVVFTSLHGTSVPIVPELLQSLNFNQFNLVEAQCKPDPNFSSVQSANPEDHRAFDQAVELANKSHADLLISTDPDADRLGIAERDAHGHITYFNGNQIGALLLNYRIQQTSQLRHRLMIQSIVSSELTKSLARYNNVEYKEVLTGFKFIAQEIRQLDDHQNMIFAFEESYGFLSEPFVRDKDAVQIVPLIIKYASELKLYGKTLKDELEQIYQTVGRHEDTLFSHTLEGFEGKKKINAIMTKFRSNPPQEIQGLKVKAIEDYLTSEVYHLDKDTTSQINSPKSNVIRVLFDEGFIALRPSGTEPKIKLYVSLKCPNFDDVAQKINAMIFS

SEQ ID NO: 12897 - protein, 239 aa, Staphylococcus aureus
MVQHLTAEEIIQYISDAKKSTPIKVYLNGNFEGITYPESFKVFGSEQSKVIFCEADDWKPFYEAYGSQFEDIEIEMDRRNSAIPLKDLTNTNARIEPGAFIREQAIIEDGAVVMMGATINIGAVVGEGTMIDMNATLGGRATTGKNVHVGAGAVLAGVIEPPSASPVIIEDDVLIGANAVILEGVRVGKGAIVAAGAIVTQDVPAGAVVAGTPAKVIKQASEVQDTKKEIVAALRKLND

SEQ ID NO: 12898 - protein, 843 aa, Staphylococcus aureus; identical to SEQ ID NO: 5370

SEQ ID NO: 12899 - protein, 1002 aa, Staphylococcus aureus
MRCLQMNTIYEPSSICMIRTPLLSVEFFNLFLNTEQIKYSDLQLNAQMKESILTTTFNLYCTLQEINFDGDNKKVRDAKESLLKYLIRMSTRPTPFGLLSGINLGHFVNEPTRLKVGNSIQKYVKVDGEWLYKLVSYIESIDEYYQNLKVIWNSKAHIINDRIYLNEQSAIYLNNNKDTSFSIKNSELLVFIKTTVTNNNITFSNLAEKINQEFEINDITKVKVYIHNLVSKEIIYSTIRPPLSYSDNLNYILNKLSLHNDDFVKKIREIQKLILAYEKTEIGFGEELYKDIIHHMKALFKCKNYLQIDTKIDMINNYLHQDIATNISEAAYLLWLLSRNNIGFTDLKVLHNRFIEKYGFEQLVNIKDLISDITGFGTTIFQEEETDGNNIVMLKQKFLHALRNNDEIVINEKDVESLINDNEINHYHAPMSADVYAELYLGRFYNQYNELIVISPLTASFNAGATFGRFHHLIDTETLAKLEHEKGHYYQKMICDDNVEMISINNIPKYPRNHNVLTNHDSYEYSLNLGSSNSYSKYELTLDDIYVGATFNKLYLYSSQLNKRVLFESNNMYNFLKECNLYRLLREISMESVKCIEPMNDVSIDSFSYSPRIRYKNVILKPAYWKINEMVLPLPKNEEWDQQFLKYQEQFNIPNIVNLVYGDNKLLLNLSLANHRYLLMKEYKKHKRVRLVESFLPQSKNDHVYEIVTPIYKKSSYRGPEIEIPKYKNTDIEYDKDWFALHIHIDKPSQDTFIIDNLYPFVKHLKDKGDIDQYFLMRYIKQGDILKLRLFRNDENYAEIYSILKNWLPHVRQTTEVSDYEFVSYEPEFFRYGGKNTINEIEAFFEYDTNLAVNIIENDFKFDRPYIVAISIMYLFEMFSISNEERMEIVNNYVPTSFKSKDIRPFKNELVTICNPANNFEYMAKHYSGIYRILKDGNQILSKLNEGLKKTLTTKRSRIIGSLIHMRCNRIFGIDKDQETFVLSIVKEIVKTQKHWCGDKND

SEQ ID NO: 12900 - protein, 396 aa, Staphylococcus aureus; identical to SEQ ID NO: 12541

SEQ ID NO: 12901 - protein, 286 aa, Staphylococcus aureus
MACLFNIVTGKQSQDDIVFHHFSKIFTKQGVSLMRTPIIAGNWKMNKTVQEAKDFVNALPTLPDSKEVESVICAPAIQLDALTTAVKEGKAQGLEIGAQNTYFEDNGAFTGETSPVALADLGVKYVVIGHSERRELFHETDEEINKKAHAIFKHGMTPIICVGETDEERESGKANDVVGEQVKKAVAGLSEDQLKSVVIAYEPIWAIGTGKSSTSEDANEMCAFVRQTIADLSSKEVSEATRIQYGGSVKPNNIKEYMAQTDIDGALVGGASLKVEDFVQLLEGAK

SEQ ID NO: 12902 - protein, 434 aa, Staphylococcus aureus [sequence omitted]

SEQ ID NO: 12903 - protein, 929 aa, Staphylococcus aureus
MAYQSEYALENEMMNQLEQLGYERVTIRDNKQLLDNFRTILNERHADKLEGNPLTDKEFQRLLTMIDGKSIFESARILRDKLPLRRDDESEIYLSFLDTKSWCKNKFQVTNQVSVEDTYKARYDVTILINGLPLVQVELKRRGIDINEAFNQVKRYRKQNYTGLFRYIQMFIISNGVETRYFSNNDSELLKSHMFYWSDKQNNRINTLQSFAESFMRPCQLAKMISRYMIINETDRILMAMRPYQVYAVEALIQQATETGNNGYVWHTTGSGKTLTSFKASQILSQQDDIKKVIFLVDRKDLDSQTEEEFNKFAKGAVDKTFNTSQLVRQLNDKSLPLIVTTIQKMAKAIQGNAPLLEQYKTNKVVFIIDECHRSQFGDMHRLVKQHFKNAQYFGFTGTPRFPENSSQDGRTTADIFGRCLHTYLIRDAIHDGNVLGFSVDYINTFKNKALKAEDNSMVEAIDTEEVWLADKRVELVTRHIINNHDKYTRNRQYSSIFTVQSIHALIKYYETFKRLNKKLEQPLTIAGIFTFKPNEDDRDGEVPYHSREKLEIMISDYNKKFETNFSTDTTNEYFNHISKNVKKGVKDSKIDILIVVNMFLTGFDSKVLNTLYVDKNLMYHDLIQAYSRTNRVEKESKPFGKIVNYRDLKKETDDALRVFSQTNDTDTILMRSYEEYKKEFMDAYRELKMIVPTPHMVDDIQDEEELKRFVEAYRLLAKIILRLKAFDEFEFTIDEIGMDEQENEDYKSKYLAVYDQVKRATAEKNKVSILNDIDFEIEMMRNDTINVNYIMNILRQIDLEDKAEQRRNQEQIRRILDHADDPTLRLKRDLIREFIDNVVPSLNKDDDIDQEYVNFESIKKEAEFKGFAGERSIDEQALKTISNDYQYSGVVNPHHLKKMIGDLPLKEKRKARKAIESFVAETTEKYGV

SEQ ID NO: 12904 - protein, 299 aa, Staphylococcus aureus
MMENSTTEARNEATMHLDEMTVEEALITMNKEDQQVPLAVRKAIPQLTKVIKKTIAQYKKGGRLIYIGAGTSGRLGVLDAAECVPTFNTDPHEIIGIIAGGQHAMTMAVEGAEDHKKLAEEDLKNIDLTSKDVVIGIAASGKTPYVIGGLTFANTIGATTVSISCNEHAVISEIAQYPVEVKVGPEVLTGSTRLKSGTAQKLILNMISTITMVGVGKVYDNLMIDVKATNQKLIDRSVRIIQEICAITYDEAMALYQVSEHDVKVATVMGMCGISKEEATRRLLNNGDIVKRAIRDRQP

SEQ ID NO: 12905 - protein, 185 aa, Staphylococcus aureus
MINFNKTALVLIDLQEGILKMDYAPYTAENVVQNANKLIDVFRKNNGFIAFVRVNFYDGKDVLQPNAMISLPPKEGDDYSRFHHLLDKRDDDFVIDKRHFSAFVGTDLDLQLRRRGIDTIVLGGVATHIGVDTTARDAYQLNYNQFFVTDMMSAQNETLHQFPIDNVFPLMGQTITTNDFLNILN

SEQ ID NO: 12906 - protein, 373 aa, Staphylococcus aureus; identical to SEQ ID NO: 12621

SEQ ID NO: 12907 - protein, 322 aa, Staphylococcus aureus; identical to SEQ ID NO: 5425

SEQ ID NO: 12908 - protein, 314 aa, Staphylococcus aureus
MLDFEKPLFEIRNKIESLKESQDKNDVDLQEEIDMLEASLERETKKIYTNLKPWDRVQIARLQERPTTLDYIPYIFDSFMELHGDRNFRDDPAMIGGIGFLNGRAVTVIGQQRGKDTKDNIYRNFGMAHPEGYRKALRLMKQAEKFNRPIFTFIDTKGAYPGKAAEERGQSESIATNLIEMASLKVPVIAIVIGEGGSGGALGIGIANKVLMLENSTYSVISPEGAAALLWKDSNLAKIAAETMKITAHDIKQLGIIDDVISEPLGGAHKDIEQQALAIKSAFVAQLDSLESLSRDEIANDRFEKFRNIGSYIE

SEQ ID NO: 12909 - protein, 415 aa, Staphylococcus aureus; identical to SEQ ID NO: 12593

SEQ ID NO: 12910 - protein, 245 aa, Staphylococcus aureus; identical to SEQ ID NO: 12596

SEQ ID NO: 12911 - protein, 313 aa, Staphylococcus aureus; identical to SEQ ID NO: 12210

SEQ ID NO: 12912 - protein, 398 aa, Staphylococcus aureus; identical to SEQ ID NO: 12212

SEQ ID NO: 12913 - protein, 2186 aa, Staphylococcus aureus
MNLLKKNKYSIRKYKVGIFSTLIGTVLLLSNPNGAQALTTDNNVQSDTNQATPVNSQDKDVANNRGLANSAQNTPNQSATTNQATNQALVNHNNGSIVNQATPTSVQSSTPSAQNNNHTDGNTTATETVSNANNNDVVSNNTALNVPTKTNENGSGGHLTLKEIQEDVRHSSNKPELVAIAEPASNRPKKRSRRAAPADPNATPADPAAAAVGNGGAPVAITAPYTPTTDPNANNAGQNAPNEVLSFDDNGIRQSTNRSVPTVNVVNNLPGFTLINGGKVGVFSHAMVRTSMFDSGDNKNYQAQGNVIALGRIHGTDTNDHGDFNGIEKALTVNPNSELIFEFNTMTTKNGQGATNVIIKNADTNDTIAEKTVEGGPTLRLFKVPDNVRNLKIQFVPKNDAITDARGIYQLKDGYKYYSFVDSIGLHSGSHVFVERRTMDPTATNNKEFTVTTSLKNNGNSGASLDTNDFVYQVQLPEGVEYVNNSLTKDFPSNNSGVDVNDMNVTYDAANRVITIKSTGGGTANSPARLMPDKILDLRYKLRVNNVPTPRTVTFNETLTYKTYTQDFINSAAESHTVSTNPYTIDIIMNKDALQAEVDRRIQQADYTFASLDIFNGLKRRAQTILDENRNNVPLNKRVSQAYIDSLTNQMQHTLIRSVDAENAVNKKVDQMEDLVNQNDELTDEEKQAAIQVIEEHKNEIIGNIGDQTTDDGVTRIKDQGIQTLSGDTATPVVKPNAKKAIRDKATKQREIINATPDVTEDEIQDALNQLATDETDAIDNVTNATTNADVETAKNNGINTIGAVVPQVTHKKAARDAINQATATKRQQINSNREATQEEKNAALNELTQATNHALEQINQATTNADVDNAKGDGLNAINPIAPVTVVKQAARDAVSHDAQQHIAEINANPDATQEERQAAIDKVNAAVTAANTNILNANTNADVEQVKTNAIQGIQAITPATKVKTDAKNAIDKSAETQHNTIFNNNDATLEEQQAAQQLLDQAVATAKQNINAADTNQEVAQAKDQGTQNIVVIQPATQVKTDTRNVVNDKAREAITNINATTGATREEKQEAINRVNTLKNRALTDIGVTSTTAMVNSIRDDAVNQIGAVQPHVTKKQTATGVLNDLATAKKQEINQNTNATTEEKQVALNQVDQELATAINNINQADTNAEVDQAQQLGTKAINAIQPNIVKKPAALAQINQHYNAKLAEINATPDATNDEKNAAINTLNQDRQQAIESIKQANTNAEVDQAATVAENNIDAVQVDVVKKQAARDKITAEVAKRIEAVKQTPNATDEEKQAAVNQINQLKDQAINQINQNQTNDQVDTTTNQAVNAIDNVEAEVVIKPKAIADIEKAVKEKQQQIDNSLDSTDNEKEVASQALAKEKEKALAAIDQAQTNSQVNQAATNGVSAIKIIQPETKVKPAAREKINQKANELRAKINQDKEATAEERQVALDKINEFVNQAMTDITNNRTNQQVDDTTSQALDSIALVTPDHIVRAAARDAVKQQYEAKKREIEQAEHATDEEKQVALNQLANNEKRALQNIDQAIANNDVKRVETNGIATLKGVQPHIVIKPEAQQAIKASAENQVESIKDTPHATVDELDEANQLISDTLKQAQQEIENTNQDAAVTDVRNQTIKAIEQIKPKVRRKRAALDSIEENNKNQLDAIRNTLDTTQDERDVAIDTLNKIVNTIKNDIAQNKTNAEVDRTETDGNDNIKVILPKVQVKPAARQSVGVKAEAQNALIDQSDLSTEEERLAAKHLVEQALNQAIDQINHADKTAQVNQDSINAQNIISKIKPATTVKATALQQIQNIATNKINLIKANNEATDEEQNIAIAQVEKELIKAKQQIASAVTNADVAYLLHDEKNEIREIEPVINRKASAREQLTTLFNDKKQAIEANIQATVEERNSILAQLQNIYDTAIGQIDQDRSNAQVDKTASLNLQTIHDLDVHPIKKPDAEKTINDDLARVTALVQNYRKVSNRNKADALKAITALKLQMDEELKTARTNADVDAVLKRFNVALSDIEAVITEKENSLLRIDNIAQQTYAKFKAIATPEQLAKVKVLIDQYVADGNRMIDEDATLNDIKQHTQFIVDEILAIKLPAEATKVSPKEIQPAPKVCTPIKKEETHESRKVEKELPNTGSEGMDLPLKEFALITGAALLARRRTKNEKES

SEQ ID NO: 12914 - protein, 323 aa, Staphylococcus aureus; identical to SEQ ID NO: 5445

SEQ ID NO: 12915 - protein, 718 aa, Staphylococcus aureus
MEKTKTLLNLRTRWVILMKTMEEKKYNHIELNNEVTKRREDGFFSLEKDQEALVAYLEEVKDKTIFFDTEIERLRYLVDNDFYFNVFDIYSEADLIEITDYAKSIPFNFASYMSASKFFKDYALKTNDKSQYLEDYNQHVAIVALYLANGNKAQAKQFISAMVEQRYQPATPTFLNAGRARRGELVSCFLLEVDDSLNSINFIDSTAKQLSKIGGGVAINLSKLRARGEAIKGIKGVAKGVLPIAKSLEGGFSYADQLGQRPGAGAVYLNIFHYDVEEFLDTKKVNADEDLRLSTISTGLIVPSKFFDLAKEGKDFYMFAPHTVKEEYGVTLDDIDLEKYYDDMVANPNVEKKKKNAREMLNLIAQTQLQSGYPYLMFKDNANRVHPNSNIGQIKMSNLCTEIFQLQETSIINDYGIEDEIKRDISCNLGSLNIVNVMESGKFRDSVHSGMDALTVVSDVANIQNAPGVRKANSELHSVGLGVMNLHGYLAKNKIGYESEEAKDFANIFFMMMNFYSIERSMEIAKERGIKYQDFEKSDYANGKYFEFYTTQEFEPQFEKVRELFDGMAIPTSEDWKKLQQDVEQYGLYHAYRLAIAPTQSISYVQNATSSVMPIVDQIERRTYGNAETFYPMPFLSPQTMWYYKSAFNTDQMKLIDLIATIQTHIDQGISTILYVNSEISTRELARLYVYAHYKGLKSLYYTRNKLLSVEECTSCSI

SEQ ID NO: 12916 - protein, 307 aa, Staphylococcus aureus
MINKDIYQALQQLIPNEKIKVDEPLKRYTYTKTGGNADFYITPTKNEEVQAVVKYAYQNEIPVTYLGNGSNIIIREGGIRGIVISLLSLDHIEVSDDAIIAGSGAAIIDVSRVARDYALTGLEFACGIPGSIGGAVYMNAGAYGGEVKDCIDYALCVNEQGSLIKLTTKELELDYRNSIIQKEHLVVLEAAFTLAPGKMTEIQAKMDDLTERRESKQPLEYPSCGSVFQRPPGHFAGKLIQDSNLQGHRIGGVEVSTKHAGFMVNVDNGTATDYENLIHYVQKTVKEKFGIELNREVRIIGEHPKES

SEQ ID NO: 12917 - protein, 334 aa, Staphylococcus aureus
MMQNKQILFNKIPEGMPQEDTFKIEEIDTPKLESDGVLVQTLYISVDPYMRGRMTKADSYVQPFEIGKPIVSHVVAKVIDSTLADYKKGDVVVGMLPWRIINHVQADQITKVPTTDVPLDLYLSVLGMPGQTAYHGLLDIGQPKAGDTVVVSAASGAVGSVVGQIAKIKGCRVVGIAGGDKKVNYLTETLGFDAGIDYKKEDFAEALAQAVPDGIDVYFENVGGTVGDEVFKHLNRFARVPVCGAISSYNHPEADIGPRIQGTLIKKQVMMRGFLVSEFANAFKEASEQLATWVQEGKIQSQVTIEDGFENAPHAFKNLFTGDNFGKQVIKVTE

SEQ ID NO: 12918 - protein, 142 aa, Staphylococcus aureus; identical to SEQ ID NO: 5622

SEQ ID NO: 12919 - protein, 171 aa, Staphylococcus aureus; identical to SEQ ID NO: 5623

SEQ ID NO: 12920 - protein, 103 aa, Staphylococcus aureus; identical to SEQ ID NO: 5625

SEQ ID NO: 12921 - protein, 573 aa, Staphylococcus aureus; identical to SEQ ID NO: 12247

SEQ ID NO: 12922 - protein, 532 aa, Staphylococcus aureus
MRKLTKMSAMLLASGLILTGCGGNKGLEEKKENKQLTYTTVKDIGDMNPHVYGGSMSAESMIYEPLVRNTKDGIKPLLAKKWDVSEDGKTYTFHLRDDVKFHDGTPFDADAVKKNIDAVQENKKLHSWLKISTLIDNVKVKDKYTVELNLKEAYQPALAELAMPRPYVFVSPKDFKNGTTKDGVKKFDGTGPFKLGEHKKDESADFNKNDQYWGEKSKLNKVQAKVMPAGETAFLSMKKGETNFAFTDDRGTDSLDKDSLKQLKDTGDYQVKRSQPMNTKMLVVNSGKKDNAVSDKTVRQAIGHMVNRDKIAKEILDGQEKPATQLFAKNVTDINFDMPTRKYDLKKAESLLDEAGWKKGKDSDVRQKDGKNLEMAMYYDKGSSSQKEQAEYLQAEFKKMGIKLNINGETSDKIAERRTSGDYDLMFNQTWGLLYDPQSTIAAFKAKNGYESATSGIENKDKIYNSIDDAFKIQNGKERSDAYKNILKQIDDEGIFIPISHGSMTVVAPKDLEKVSFTQSQYELPFNEMQYK

SEQ ID NO: 12923 - protein, 212 aa, Staphylococcus aureus
MDNASEQQVVDFVSDIKEQFGRIDVLFNNAGVDNAADRIHEYPIDVYDKIMNVDMRGTFLMTKMMLPLMMNQGGSIVNTSSFSGQAADLYRSGYNAAKGAVINFTKSIAIEYGRDSIRANAIAPGTIETPLVDKLTGTSEDDAGKTFRENQKWMTPLGRLGKPEEVAKLVVFLASDDSSFITGETIRIDGGVMAYTWPGEMLSDDSWKRTLE

SEQ ID NO: 12924 - protein, 28 aa, Staphylococcus aureus
MKRLENKVAVVTGASTGIGQASAIALAQ

SEQ ID NO: 12925 - protein, 512 aa, Staphylococcus aureus
MTSKHQQKGSIVNRFLNSVEKIGNKLPDPSVLFFLMCVGLAIMTWVISLFNVSVKHPGTHQTIYIKNIISHDGFTMIMNDTIKNFSEFPALGLVLAVMIGIGVAEKTGYFDKLMISVVNRAPRFLILPTIILIGILGSTAGDAATIILPPLAAMLFIKIGYHPIAGLTMAYASAVGGFAANIVVGMQDALVYSFTEPATRIVSDSIKTNVAMNWYFIAASVVVLLPTILLVTTKLIIPRLGKYDDSLMHDDHEETSSHITDKEAHALKWANISFIVTIILLIITAIPEHSFLRNAKTGSLLDDAPLINGVGLIILVVFLVPGLVYGILSKEIKNTKDLGKMFGDAVGSMGTFIVIVFFAAQLLAYLKWSNLGIIAAVKGAKLLEHQNGIVLILGIIVLSAMVNMLIGSASAKWGILGPIFVPMLILIGFHPAFTQVIYRVGDSITNPITPMMPYLPLLLTYAQKYDKRMKLGALLSSLMPYSIALSIVWTVFVIIWFLLGIPVGPGGPIFVK

SEQ ID NO: 12926 - protein, 525 aa, Staphylococcus aureus
MTFLTVMQFIVNIIVVGFMLTVIVIGLIWLIKDKRQSQHSVLRNYPLLARIRYISEKMGPELRQYLFSGDNEGKPFSRNDYKNIVLAGKYNSRMTSFGTTKDYQDGFYIQNTMFPMQRNEISVDNTTLLSTFIYKIANERLFSREEYRVPTKIDPYYLSDDHAIKLGEHLKHPFILKRIVGQSGMSYGALGKNAITALSKGLAKAGTWMNTGEGGLSEYHLKGNGDIIFQIGPGLFGVRDKEGNFSEGLFKEVAQLSNVRAFELKLAQGAKTRGGHMEAEKVNEEIAKIRNVEPYKTINSPNRYEFIHNAEDLIRFVDQLQQLGQKPVGFKIVVSKVSEIETLVRTMVELDKYPSFITIDGGEGGTGATFQELQDGVGLPLFTALPIVSGMLEKYGIRDKVKLAASGKLVTPDKIAIALGLGADFVNIARGMMISVGCIMSQQCHMNTCPVGVATTDAKKEKALIVGEKQYRVTNYVTSLHEGLFNIAAAVGVSSPTEITADHIVYRKVDGELQTIHDYKLKLIS

SEQ ID NO: 12927 - protein, 271 aa, Staphylococcus aureus; identical to SEQ ID NO: 5851

SEQ ID NO: 12928 - protein, 456 aa, Staphylococcus aureus
MGQTLFDKVWNRHVLYGKLGEPQLLYIDLHLIHEVTSPQAFEGLRLQNRKLRRPDLTFATLDHNVPTIDIFNIKDEIANKQITTLQKNAIDFGVHIFDMGSDEQGIVHMVGPETGLTQPGKTIVCGDSHTATHGAFGAIAFGIGTSEVEHVFATQTLWQTKPKNLKIDINGTLPTGVYAKDIILHLIKTYGVDFGTGYALEFTGETIKNLSMDGRMTICNMAIEGGAKYGIIQPDDITFEYVKGRPFADNFAKSVDKWRELYSDDDAIFDRVIELDVSTLEPQVTWGTNPEMGVNFSEPFPEINDINDQRAYDYMGLEPGQKAEDIDLGYVFLGSCTNARLSDLIEASHIVKGNKVHPNITAIVVPGSRTVKKEAEKLGLDTIFKNAGFEWREPGCSMCLGMNPDQVPEGVHCASTSNRNFEGRQGKGARTHLVSPAMAAAAAIHGKFVDVRKVVV

SEQ ID NO: 12929 - protein, 562 aa, Staphylococcus aureus
MRSDMIKKGDHQAPARSLLHATGALKSPTDMNKPFVAICNSYIDIVPGHVHLRELADIAKEAIREAGAIPFEFNTIGVDDGIAMGHIGMRYSLPSREIIADAAETVINAHWFDGVFYIPNCDKITPGMILAAMRTNVPAIFCSGGPMKAGLSAHGKALTLSSMFEAVGAFKEGSISKEEFLDMEQNACPTCGSCAGMFTANSMNCLMEVLGLTLPYNGTALAVSDQRREMIRQAAFKLVENIKNDLKPRDIVTREAIDDAFALDMAMGGSTNTVLHTLAIANEAGIDYDLERINAIAKRTPYLSKIAPSSSYSMHDVHEAGGVPAIINELMKKDGTLHPDRITVTGKTLRENNEGKEIKNFDVIHPLDAPYDAQGGLSILFGNIAPKGAVIKVGGVDPSIKTFTGKAICFNSHDEAVEAIDNRTVRAGHVVVIRYEGPKGGPGMPEMLAPTSSIVGRGLGKDVALITDGRFSGATRGIAVGHISPEAASGGPIALIEDGDEITIDLTNRTLNVNQPEDVLARRRESLTPFKAKVKTGYLARYTALVTSANTGGVMQVPENLI

SEQ ID NO: 12930 - protein, 84 aa, Staphylococcus aureus; identical to SEQ ID NO: 5915

SEQ ID NO: 12931 - protein, 565 aa, Staphylococcus aureus; identical to SEQ ID NO: 12352

SEQ ID NO: 12932 - protein, 88 aa, Staphylococcus aureus; identical to SEQ ID NO: 5525

SEQ ID NO: 12933 - protein, 296 aa, Staphylococcus aureus
MEQTAFRLFNAEGDGVGGLTIDNYDGHLLIQWYSKGIYKFKYAILEAVRKVFDYKSIYEKVRFKDSEYSGGFVEGDAPEFPIVIEENFTFYNVDLEDGLMTGIFLDQKEVRKKLRDQYAKERHVLNLFSYTGAFSAIAASEASSTTSVDLANRSRSLTEENFGLNAIDPKSQYIYVMDTFDFYKYAARHGHSYDTIVIDPPSFARNKKRTFSVQKDYDKLINGALNILSSEGTLLLCTNASVYPLKQFKNTIKKTLEESGVDYELTEVMGLPKDFKTHPHYKPSKYLKAVFVNIRH

SEQ ID NO: 12934 - protein, 468 aa, Staphylococcus aureus; identical to SEQ ID NO: 5530

SEQ ID NO: 12935 - protein, 430 aa, Staphylococcus aureus
MAFEFRLPDIGEGIHEGEIVKWFVKAGDTIEEDDVLAEVQNDKSVVEIPSPVSGTVEEVMVEEGTVAVVGDVIVKIDAPDAEDMQFKGHDDDSSSKEEPAKEEAPAEQAPVATQTEEVDENRTVKAMPSVRKYAREKGVNIKAVSGSGKNGRITKEDVDAYLNGGAPTASNESAASATSEEVAETPAAPAAVTLEGDFPETTEKIPAMRRAIAKAMVNSKHTAPHVTLMDEIDVQALWDHRKKFKEIAAEQGTKLTFLPYVVKALVSALKKYPALNTSFNEEAGEIVHKHYWNIGIAADTDRGLLVPVVKHADRKSIFQISDEINELAVKARDGKLTADEMKGATCTISNIGSAGGQWFTPVINHPEVAILGIGRIAQKPIVKDGEIVAAPVLALSLSFDHRQIDGATGQNAMNHIKRLLNNPELLLMEG

SEQ ID NO: 12936 - protein, 149 aa, Staphylococcus aureus; identical to SEQ ID NO: 12588

SEQ ID NO: 12937 - protein, 68 aa, Staphylococcus aureus
MRYVMMSQLVFKMVYQHPGFSSSINYYDSYRAADLPANLIQAQRDYFGAHTYERKDKEGVFHTQWIEE

SEQ ID NO: 12938 - protein, 98 aa, Staphylococcus aureus
MKKVLIANRGEIAVRIIRACRDLGIQTVAIYSEGDKDALHTQIADEAYCVGPTLSKDSYLNIPNILSIATSTGCDGVHPGYGFLAENADFAELCEHAN

SEQ ID NO: 12939 - protein, 358 aa, Staphylococcus aureus
MRTCQLKFIGPSYQSIQKMGIKDVAKAEMIKANVPVVPGSDGLMKDVSEAKKIAKKIGYPVIIKATAGGGGKGIRVARDEKELETGFRMTEQEAQTAFGNGGLYMEKFIENFRHIEIQIVGDSYGNVIHLGERDCTIQRRMQKLVEEAPSPILDDETRREMGNAAVRAAKAVNYENAGTIEFIYDLNDNKFYFMEMNTRIQVEHPVTEMVTGIDLVKLQLQVAMGDVLPYKQEDIKLTGHAIEFRINAENPYKNFMPSPGKIEQYLAPGGYGVRIESACYTNYTIPPYYDSMVAKLIIHEPTRDEAIMAGIRALSEFVVLGIDTTIPFHIKLLNNDIFRSGKFNTNFLEQNSIMNDEG

SEQ ID NO: 12940 - protein, 445 aa, Staphylococcus aureus
MSDYLSVSALTKYIKYKFDQDPHLQSVLIKGELSNFKKHSSGHLYFNVKDKESVISAMMFKGSASKLNFEPKEGDEVLLEARVSVFERRGNYQIYVNKMQLDGIGNLYQKLEALKKKLTEEGCFDKANKKSIPKFPKKIAVLTASTGAAIRDIHSTINSRFPLAEQIQISTLVQGEKAKDDIIEKIEYADSLGVDTIIVGRGGGSIEDLWNFNEEAVVRAIYNCKTPIISAVGHETDFTLSDFAADIRAATPTQAAVIATPDQYELLQQIQQYQFTLTRFIKKHLEQQRKHVEHLSSYYKFKQPTLLYDQQIQRRDDLEKRLKQQIQATFEQQRHRLMLLQQRYNLKALLSSVNQEQQNNLQLTNQLVKLLNSKILSYKNDLKNKVENLNNLSPTNTMLRGYAIVNKKDEVITSTKDLTENDQLTLTMKDGLVDAKVTKVRCNND

SEQ ID NO: 12941 - protein, 482 aa, Staphylococcus aureus
MGSFFNKIARKEDPAIYQNKDGHLKRTLRVRDFLALGVGTIVSTSIFTLPGIVAAEHAGPAVALSFLLAAIVAGLVAFTYAEMAAAMPFAGSAYSWVNVLFGEFFGWVAGWALLAEYFIAVAFVASGFSANLRGLVKPIGIELPAALSNPFGTNGGFIDIIAAIVILLTALLLSRGMSEAARMENILVILKVLAIILFVIVGLTAINVSNYVPFIPEHKVTATGDFGGWQGIYAGVSMIFLAYIGFDSIAANSAEALDPQKTMPRGILGSLSVAIVLFIAVALVLVGMFHYSQYANNAEPVGWALRQSGHGVVAAIVQAISVIGMFTALIGMMLAGSRLLYSFGRDGLLPSWLSHLNDKHLPNRALVILTIIGVLIGSMFPFAFLAQLISAGTLVAFMFVSLAMYRLRKREGKDLPIPAFKLPLYPVLPAITFVLVLLVFWGLGFEAKLYTLIWFIVGIILYLSYGLRHSKKNDVAEYHPPK

SEQ ID NO: 12942 - protein, 719 aa, Staphylococcus aureus
MSKQPHYENSLVCSCLLFLYMEAEIEIGDVYMFKKLFGQLQRIGKALMLPVAILPAAGILLAFGNAMHNEQLVEIAPWLKNDIIVMISSVMEAAGQVVFDNLPLLFAVGTALGLAGGDGVAALAALVGYLIMNATMGKVLHITIDDIFSYAKGAKELSQAAKEPAHALVLGIPTLQTGVFGGIIMGALAAWCYNKFYNITLPPFLGFFAGKRFVPIVTSVVAIATGVLLSFAWPPIQDGLNSLSNFLLNKNLTLTTFIFGIIERSLIPFGLHHIFYSPFWFEFGSYTNHAGELVRGDQRIWMAQLKDGVPFTAGAFTTGKYPFMMFGLPAAAFAIYKNARPERKKVVGGLMLSAGLTAFLTGITEPLEFSFLFVAPVLYGIHVLLAGTSFLVMHLLGVKIGMTFSGGFIDYILYGLLNWDRSHALLVIPVGIVYAIVYYFLFDFAIRKFKLKTPGREDEETEIRNSSVAKLPFDVLDAMGGKENIKHLDACITRLRVEVVDKSKVDVAGIKALGASGVLEVGNNMQAIFGPKSDQIKHDMAKIMSGEITKPSETTVTEEMSDEPVHVEALGTTDIYAPGIGQIIPLSEVPDQVFAGKMMGDGVGFIPEKGEIVAPFDGTVKTIFPTKHAIGLESESGVEVLIHIGIDTVKLNGEGFESLINVDEKVTQGQPLMKVNLAYLKAHAPSIVTPMIITNLENKELVIEDVQDADPGKLIMTVK

SEQ ID NO: 12943 - protein, 579 aa, Staphylococcus aureus; identical to SEQ ID NO: 5821

SEQ ID NO: 12944 - protein, 68 aa, Staphylococcus aureus
MPYLYGDDINKLQGRPIVGLSHAAGYACGYHLVKYFLQKTNIPIEVATTLPAQKIINEVTEFWHTHTL

SEQ ID NO: 12945 - protein, 79 aa, Staphylococcus aureus; identical to SEQ ID NO: 5861

SEQ ID NO: 12946 - protein, 1229 aa, Staphylococcus aureus; identical to SEQ ID NO: 5818

SEQ ID NO: 12947 - protein, 325 aa, Staphylococcus aureus; identical to SEQ ID NO: 3805

SEQ ID NO: 12948 - protein, 104 aa, Staphylococcus aureus; identical to SEQ ID NO: 3804

SEQ ID NO: 12949 - protein, 212 aa, Staphylococcus aureus
MYKINIIRSDSVYNNILKAPINDRDSIFTKEILVPFKKKFEVQHMPIYNDDKQTMSAIQFLDAFQISPKDLRMSDQMSIQYLNNDFWSNCEKYLKVAIDQFSNYSISSQVSNYHFTVLLGDRQKPLMYLNKNRGGDGGIPGYIMIYLVPSTSTINSMKSLIAHEVNHNMRYQYIDWDGGSLIELIIAEGLAENYVESLYGKAHIGPWVTNTN

SEQ ID NO: 12950 - protein, 89 aa, Staphylococcus aureus; identical to SEQ ID NO: 5442

SEQ ID NO: 12951 - protein, 574 aa, Staphylococcus aureus; identical to SEQ ID NO: 12326

SEQ ID NO: 12952 - protein, 567 aa, Staphylococcus aureus
MKQSKVFIPTMRDVPSEAEAQSHRLLLKSGLIKQSTSGIYSYLPLATRVLNNITAIVRQEMERIDSVEILMPALQQAELWEESGRWGAYGPELMRLQDRHGRQFALGPTHEELVTSIVRNELKSYKQLPMTLFQIQSKFRDEKRPRFGLLRGREFIMKDAYSFHADEASLDQTYQDMYQAYSRIFERVGINARPVVADSGAIGGSHTHEFMALSAIGEDTIVYSKESDYAANIEKAEVVYEPNHKHTTVQPLEKIETPNVKTAQELADFLGRPVDEIVKTMIFKVDGEYIMVLVRGHHEINDIKLKSYFGTDNIELATQDEIVNLVGANPGSLGPVIDKEIKIYADNFVQDLNNLVVGANEDGYHLINVNVGRDFNVDEYGDFRFILEGEKLSDGSGVAHFAEGIEVGQVFKLGTKYSESMNATFLDNQGKAQSLIMGCYGIGISRTLSAIVEQNHDDNGIVWPKSVTPFDLHLISINPKKDDQRELADALYAEFNTKFDVLYDDRQERAGVKFNDADLIGLPLRIVVGKRASEGIVEVKERLTGDSEEVHIDDLMTVITNKYDNLK

SEQ ID NO: 12953 - protein, 391 aa, Staphylococcus aureus
MSSNELLLATEYLEKEKKIPRAVLIDAIEAALITAYKKNYDSARNVRVELNMDQGTFKVIARKDVVEEVFDDRDEVDLSTALVKNPAYEIGDIYEEDVTPKDFGRVGAQAAKQAVMQRLRDAEREILFEEFIDKEEDILTGIIDRVDHRYVYVNLGRIEAVLSEAERSPNEKYIPNERIKVYVNKVEQTTKGPQIYVSRSHPGLLKRLFEQEVPEIYDGTVIVKSVAREAGDRSKISVFSENNDIDAVGACVGAKGARVEAVVEELGGEKIDIVQWNEDPKVFVKNALSPSQVLEVIVDETNQSTVVVVPDYQLSLAIGKRGQNARLAAKLTGWKIDIKSETDAREAGIYPVVEAEKVTEEDVALEDADTTESTEEVNDVSVETNVEKESE

SEQ ID NO: 12954 - protein, 178 aa, Staphylococcus aureus
MWYSYVSSTQRPSVNVITGLIKANIPTRIAFMVSSSVDSRTILDSGGAERLLGYGDMLYLGSGMNKPIRVQGTFVSDDEIDDVVDFIKQQREPDYLFEEKELLKKTQTQSQDELFDDVCAFMVNEGHISTSLIQRHFQIGYNRAARIIDQLEQLGYVSSANGSKPRDVYVTEADLNKE

SEQ ID NO: 12955 - protein, 1111 aa, Staphylococcus aureus
MSWFDKLFGEDNDSNDDLIHRKKKRRQESQNIDNDHDSLLPQNNDIYSRPRGKFRFPMSVAYENENVEQSADTISDEKEQYHRDYRKQSHDSRSQKRHRRRRNQTTEEQNYSEQRGNSKISQQSIKYKDHSHYHTNKPGTYVSAINGIEKETHKPKTHNMYSNNTNHRAKDSTPDYHKESFKTSEVPSAIFGTMKPKKLENGRIPVSKPSEKVESDKQKYDKYVAKTQTSQNKQLEQEKQNDSVVKQGTASKSSDENVSSTTKSMPNYSKVDNTIKIENIYASQIVEEIRRERERKVLQKRRFKKALQQKREEHKNEEQDAIQRAIDEMYAKQAERYVGDSSLNDDSDLTDNSTDASQLHTNGIENETVSNDENKQASIQNEDTNDTHLDESPYNYEEVSLNQVSTTKQLSDDEVTVSNVTSQHQSALQHNVEVNDKDELKNQSRLIADSEEDGATNKEEYSGSQIDDAEFYELNDTEVDEDTTSNIEDNTNRNASEMHVDAPKTQEYAVTESQVNNIDKTVDNEIELAPRHKKDDQTNLSVNSLKTNDVNDNHVVEDSSMNEIEKNNAEITENVQNEAAESEQNVEEKTIENVNPKKQTEKVSTLSKRPFNVVMTPSDKKRMMDRKKHSKVNVPELKPVQSKQAVSERMPASQATPSSRSDSQESNTNAYKTNNMTSNNVENNQLIGHAETENDYQNAQQYSEQKPSVDSTQTEIFEESQDDNQLENEQVDQSTSSSVSEVSDITEESEETTHPNNTSGQQDNDDQQKDLQSSFSNKNEDTANENRPRTNQQDVATNQAVQTSKPMIRKGPNIKLPSVSLLEEPQVIESDEDWITDKKKELNDALFYFNVPAEVQDVTEGPSVTRFELSVEKGVKVSRITALQDDIKMALAAKDIRIEAPIPGTSRVGIEVPNQNPTTVNLRSIIESPSFKNAESKLTVAMGYRINNEPLLMDIAKTPHALIAGATGSGKSVCINSILMSLLYKNHPEELRLLLIDPKMVELAPYNGLPHLVAPVITDVKAATQSLKWAVEEMERRYKLFAHYHVRNITAFNKKAPYDERMPKIVIVIDELADLMMMAPQEVEQSIARIAQKARACGIHMLVVRKDHLSM

SEQ ID NO: 12956 - protein, 215 aa, Staphylococcus aureus
MKKMILINVITVVVLLAIGIAGFYFWNKTTSYVTTDNAKVNGDQIKIASPASGQIKSLNVKQGDKLDKGDKVAIVTVQGQDGETKDMDLKMPQKGTIAKLDGMEGSMVQAGNPIAYAYNLDDLYVTANIDEKDIKDVEVGKDVDVTIDGQKASIKGKVDSIGKATAASFSLMPSSNSDGNYTKVSQVIPVKITLESEPSKQVVPGMNAEVKIHKN

SEQ ID NO: 12957 - protein, 419 aa, Staphylococcus aureus; identical to SEQ ID NO: 5864

SEQ ID NO: 12958 - protein, 299 aa, Staphylococcus aureus
MGLVIEHVTKRFGKMTAVNDISLKLESGKMLGFLGRNGAGKTTTFRMILGLSEPTEGHITYNGKKLDKTMYNRIGYLPEERGLHGKLTVEEELKYLATLKGMSKTEIQQQISYWLERFDITENRKKRIDSLSKGNQQKIQLLASMLHKPELLILDEPFSGLDPVNVELLKEAVKDLNDWGSTIVYSSHRMEHVEELCDDVCILDKGQLVVSGDINHVRASNGNKKVVIESETTLPDLTNIRGIIHSENMKQGLQLTIENEDVAKDIYQVVAHQGYVKRFQVVEPSLQDIFIEKVGGKDA

SEQ ID NO: 12959 - protein, 422 aa, Staphylococcus aureus; identical to SEQ ID NO: 12560

SEQ ID NO: 12960 - protein, 102 aa, Staphylococcus aureus; identical to SEQ ID NO: 5417

SEQ ID NO: 12961 - protein, 142 aa, Staphylococcus aureus; identical to SEQ ID NO: 12558

SEQ ID NO: 12962 - protein, 89 aa, Staphylococcus aureus; identical to SEQ ID NO: 12557

SEQ ID NO: 12963 - protein, 825 aa, Staphylococcus aureus
MSDPTLFDYSMIKGTVEAILFQNSDNFYTVLKVDTIETNEDFDTMPTVVGFLPNIVEGDVYTFKGQVVDHPRYGKQLKAETFEKEMPQTKEAIISYLSSDLFKGVGKKTAQNIVNTLGDNAINDILDDHSVLEKVSGLSQKKQKQIAEQISANQESEKIMIRLHDLGFGPKLSMAIYQFYLGDTLTILDRNPYQLIYDIKGIGFNKADQLARNIGIAYNDNERLKAALLYTLEEECIKQGHTYLPINVVIDLTVDVLNYQDEEVIEPEKLDEMLQYLNEEKRLIIDNEQVAIPSLYYSEIKSVQNLFRIKTHTNKLTEIEQSDLQMHIGEIEDANQVNYAASQKEALQTAINSKVMLLTGGPGTGKTTVIKGIVELYAEIHGLSLDYDDYVNDDYPVVLAAPTGRASKRLQESTGLEAMTIHRLIGWNQDTKPEDILENEINARLIIIDEMSMVDTWLFHQFLSAVPLDAQLIFVGDEDQLPSVGPGQVFKDLIESKAIPRVNLTEVYRQQDGSSIIELAHRMKLGQKIDITQRFHDRSFINCQANQIPTVVEKVVTSAVNKGYTMADIQVLAPMYKGNAGIKRLNQVLQDILNPKKKDTREIEFGDVVFRKGDKVLQLVNRPNDNIFNGDIGVIVGIFWAKENALNKDVLVVDFEGNEITFTKQDMMELTHAYCTSIHKSQGSEFPIVIMPIVKQYFRMLQRPILYTGLTRAKTSLVLLGDPEAFDIGLKTNGQARLTQLCTLLKNYFNSEDEEMLENTATNDTGASQTTIDDQVEAPMSSNDSEEVMSDSTKTDTNVLTEATMFKIDPMINMGEITPYDFIER

SEQ ID NO: 12964 - protein, 91 aa, Staphylococcus aureus; identical to SEQ ID NO: 5914

SEQ ID NO: 12965 - protein, 234 aa, Staphylococcus aureus; identical to SEQ ID NO: 12661

SEQ ID NO: 12966 - protein, 127 aa, Staphylococcus aureus
MGYKLQGATKEAAEQLILDAKNVEQAGAVALVLEAIPNDLAEEISKHLTIPVIGIGAGKGTDGQVLVYHDMLNYGVEHKAKFVKQFADFSVGVDGLKQYDQEVKSGAFPSEEYTYKKKIMNEVNNND

SEQ ID NO: 12967 - protein, 2478 aa, Staphylococcus aureus; identical to SEQ ID NO: 5816

SEQ ID NO: 12968 - protein, 147 aa, Staphylococcus aureus; identical to SEQ ID NO: 12398

SEQ ID NO: 12969 - protein, 58 aa, Staphylococcus aureus; identical to SEQ ID NO: 12568

SEQ ID NO: 12970 - protein, 618 aa, Staphylococcus aureus; identical to SEQ ID NO: 12567

SEQ ID NO: 12971 - protein, 253 aa, Staphylococcus aureus
MNNVQRYFIDQNADVSQRFFITKKEDIHHITNVMRYDVGSKIILTFNDQTVYLCEIADITSDKIEVDLKEKQNINTELPVDVTICSGLIKADKYEWLLQKATELGASSFIAVSMERSIVKLNEAKVAKKIERWQKIIKEAAEQSYRLVIPSIQFESNLKLICDTIDNYDYILIAYEEEAKDGELSNFKQTLQQFNAQDKVLMIFGPEGGLSENEISLFSNTSTVVGLGPRILRAETAPLYALSAISYEKELMG

SEQ ID NO: 12972 - protein, 210 aa, Staphylococcus aureus
MTMRIAIEKIIGLLKNQSSKESNVKIHRLAYITNSKFDGNNYIDRWCKIRNSHIGEYSYIGFGSDFNNVEVGRYCSISSDVKIGLGKHPTHFFSSSPIFYSNNNPFNIKQKFIDFNDQPSRTTIKNDVWIGANVIIMDGLTINTGAVIAAGSVVTKNVGAYEVVGGVPAKVIKKRFDNKTIEKLLESKWWEKTPDKLKGFSVEYLNKKDT

SEQ ID NO: 12973 - protein, 284 aa, Staphylococcus aureus
MNCEIASEKNVDIVPIIADVQNRARMFEIMETYKPYAVYHAAAHKHVPLMEDNPEEAVRNNILGTKNTAEAAKNAEVKKFVMISTDKAVNPPNVMGASKRIAEMIIQSLNDETHRTNFVAVRFGNVLGSRGSVIPLFKSQIEEGGPVTVTHPEMTRYFMTIPEASRLVLQAGALAEGSEVFVLDMGEPVKIVDLARNLIKLSGKKEDDIRITYTGIRPGEKMFEELMNKDEVHPEQVFEKIYRGKVQHMKCNEVEAIIQDIVNDFSKEKIINYANGKKGDNYVR

SEQ ID NO: 12974 - protein, 363 aa, Staphylococcus aureus
MIKKFLNECHNKIINRKDGLGYKQQMRGFMAHLSVKLRLLILALIDSLIVTFSVFVSYYILEPYFKTYSVKLLILAAISLFISHHISAFIFNMYHRAWEYASVSELILIVKAVTTSIVITMVVVTIVTGNRPFFRLYLITWMMHLILIGGSRLFWRIYRKYLGGKSFNKKPTLVVGAGQAGSMLIRQMLKSDEMKLEPVLAVDDDEHKRNITITEGVKVQGKIADIPELVRKYKIKKIIIAIPTIGQERLKEINNICHMDGVELLKMPNIEDVMSGELEVNQLKKVEVEDLLGRDPVELDMDMISNELTNKTILVTGAGGSIGSEICRQVCNFYPERIILLGHGENSIYLINRELRNRFGKKC

SEQ ID NO: 12975 - protein, 185 aa, Staphylococcus aureus; identical to SEQ ID NO: 5507

SEQ ID NO: 12976 - protein, 84 aa, Staphylococcus aureus; identical to SEQ ID NO: 12377

SEQ ID NO: 12977 - protein, 286 aa, Staphylococcus aureus; identical to SEQ ID NO: 12373

SEQ ID NO: 12978 - protein, 536 aa, Staphylococcus aureus; identical to SEQ ID NO: 12372

SEQ ID NO: 12979 - protein, 189 aa, Staphylococcus aureus; identical to SEQ ID NO: 5862

SEQ ID NO: 12980 - protein, 209 aa, Staphylococcus aureus; identical to SEQ ID NO: 5452

SEQ ID NO: 12981 - protein, 343 aa, Staphylococcus aureus
MDMKIVALFPEAVEGQENQLLNTKKALGLKTFLEERGHEFIILADNGEDLDKHLPDMDVIISAPFYPAYMTRERIEKAPNLKLAITAGVGSDHVDLAAASEHNIGVVEVTGSNTVSVAEHAVMDLLILLRNYEEGHRQSVEGEWNLSQVGNHAHELQHKTIGIFGFGRIGQLVAERLAPFNVTLQHYDPINQQDHKLSKFVSFDELVSTSDAITIHAPLTPETDNLFDKDVLSRMKKHSYLVNTARGKIVNRDALVEALASEHLQGYAGDVWYPQPAPADHPWRTMPRNAMTVHYSGMTLEAQKRIEDGVKDILERFFNHEPFQDKDIIVASGRIASKSYTAK

SEQ ID NO: 12982 - protein, 119 aa, Staphylococcus aureus
MNTIDTHTKEQQFSNLVRSYRKEYVGKGPNSIRVSFKDNWAIAHMTGVLSKVESFYLNDKRNESMLHYTRTEKIKQMYKEIDVNEMESLVGAKFVKLFTDIDLNDDEVISIFVFDKSIE

SEQ ID NO: 12983 - protein, 67 aa, Staphylococcus aureus; identical to SEQ ID NO: 5863

SEQ ID NO: 12984 - protein, 782 aa, Staphylococcus aureus
MRQKTLDVLEFEKIKSLVANETISDLGLEKVNQMMPATNFETVVFQMEETDEIAQIYNKHRLPSLSGLSKVSAFIHRADIGGVLNVSELNLIKRLIQVQNQFKTFYNQLVEEDEGVKYPILDDKMNQLPVLTDLFQQINETCDTYDLYDNASYELQGIRSKISSTNQRIRQNLDRIVKSQANQKKLSDAIVTVRNERNVIPVKAEYRQDFNGIVHDQSASGQTLYIEPSSVVEMNNQISRLRHDEAIEKERILTQLTGYVAADKDALLVAEQVMGQLDFLIAKARYSRSIKGTKPIFKEDRTVYLPKAYHPLLNRETVVANTIEFMEDIETVIITGPNTGGKTVTLKTLGLIIVMAQSGLLIPTLDGSQLSVFKNVYCDIGDEQSIEQSLSTFSSHMTNIVEILKHADKHSLVLFDELGAGTDPSEGAALAMSILDHVRKIGSLVMATTHYPELKAYSYNREGVMNASVEFDVDTLSPTYKLLMGVPGRSNAFDISKKLGLSLNIINKAKTMIGTDEKEINEMIESLERNYKRVETQRLELDRLVKEAEQVHDDLSKQYQQFQNYEKSLIEEAKEKANQKIKAATKEADDIIKDLRQLREQKGADVKEHELIDKKKRLDDHYEAKSIKQNVQKQKYDKIVAGDEVKVLSYGQKGEVLEIVNDEEAIVQMGIIKMKLPIEDLEKKQKEKVKPTKMVTRQNRQTIKTELDLRGYRYEDALIELDQYLDQAVLSNYEQVYIIHGKGTGALQKGVQQHLKKHKSVSDFRGGMPSEGGFGVTVATLK

SEQ ID NO: 12985 - protein, 800 aa, Staphylococcus aureus
MLISNEWLKEYVTIDDSVSNLAERITRTGIEVDDLIDYTKDIKNLVVGFVKSKEKHPDADKLNVCQVDIGEDEPVQIVCGAPNVDAGQYVIVAKVGGRLPGGIKIKRAKLRGERSEGMICSLQEIGISSNYIPKSFESGIYVFSEAQVPGTDALQALYLDDQVMEFDLTPNRADALSMIGTAYEVAALYNTKMTKPETTSNELDLSANDELTVTIENEDKVPYYSARVVHDVTIEPSPIWMQARLIKAGIRPINNVVDISNYVLLEYGQPLHMFDQDAIGSQQIVVRQANEGEKMTTLDDTERELLTSDIVITNGQTPIALAGVMGGDFSEVKEQTSNIVIEGAIFDPVSIRHTSRRLNLRSESSSRFEKGIATEFVDEAVDRACYLLQTYANGKVLKDRVSSGELGAFITPIDITADKINRTIGFDLSQNDIVTIFNQLGFDTEINDDVITVLVPSRRKDITIKEDLIEEVARIYGYDDIPSTLPVFDKVTSGQLTDRQYKTRMVKEVLEGAGLDQAITYSLVSKEDATAFSMQQRQTIDLLMPMSEAHASLRQSLLPHLIEAASYNVARKNKDVKLFEIGNVFFANGEGELPDQVEYLSGILTGDYVVNQWQDKKETVDFYLAKGVVDRVSEKLNLEFSYRRADIDGLHPGRTAEILLENKVVGFIGELHPILAADNDLKRTYVFELNFDALMAVSVGYINYQPIPRFPGMSRDIALEVDQNIPAADLLSTIHAHGGNILKDTLVFDVYQGEHLEKGKKSIAIRLNYLDTEETLTDERVSKVQAEIEAALIEQGAVIR

SEQ ID NO: 12986 - protein, 246 aa, Staphylococcus aureus
MEQITSAQNNRIKQANKLKKKRERDKTGLALIEGVHLIEEAYQSGIVITQLFAIEPARLDQQIIAYAQEVFEINMKVAESLSGTVTPQGFFAIIEKPHYDISKAQQVLLIDRVQDPGNLGTLIRTADAAGMDAVIMEKGTTDPYQDKVLRASQGSVFHLPVMTQDLDTFITQFNGPVYGTALENAVAYKEVTSSDSFALLLGNEGEGVNPELLAHTTQNLIIPIYGKAESLNVAIAGSILLYHLKG

SEQ ID NO: 12987 - protein, 322 aa, Staphylococcus aureus
MMIKNKKKLLFLCLLVILIATAYISFVTGTIKLSFNDLFTKFTTGSNEAVDSIIDLRLPRILIALMVGAMLAVSGALLQAALQNPLAEANIIGVSSGALIMRALCMLFIPQLYFYLPLLSFIGGLIPFLIIILLHSKFRFNAVSMILVGVALFVLLNGVLEILTQNPLMKIPQGLTMKIWSDVYILAVSALLGLILTLLLSPKLNLLNLDDIQARSIGFNIDRYRWLTGLLAVFLASATVAIVGQLAFLGIIVPHVVRKLVGGNYRVLIPFSTVIGAWLLLVADLLGRVIQPPLEIPANAILMIVGGPMLIYLICQSQRNRI

SEQ ID NO: 12988 - protein, 195 aa, Staphylococcus aureus; identical to SEQ ID NO: 12341

SEQ ID NO: 12989 - protein, 266 aa, Staphylococcus aureus; identical to SEQ ID NO: 5346

SEQ ID NO: 12990 - protein, 909 aa, Staphylococcus aureus
MYAEINFIAFNCEEYYDIAIEVKVMSNTESLNIGKKRGSLTIYIGYSPGVGKTFEMLSNAIELFQSNVDIKIGYIEPHQRDETNALAEQLPKITTNFTKHGSHHFQYLDVDRIIEESPTIVLIDELAHTNISRDRHEKRYMDIEEILNHGIDVHTTLNIQHIESLSSQIELMTGVHVKERVPDYFIMSADVLEVVDISPEQLIKRLKAGKVYKKDRLDVAFSNFFTYAHLSELRTLTLRTVADLMSDKEKVRHNHKTSLKPHIAVAISGSIYNEAVIKEAFHIAQKEHAKFTAIYIDVFEKNRQYKDSQKQVHQHLMLAKSLGAKVKVVYSQTVALGLDEWCKNQDVTKLIIGQHIRNKWRDFFNTPLIDHLMSFEHSYKIEIVPIKQIPVELKMNKSPYRPKGKRFAIDMLKMILIQIICVMMGLWIYQLDKHESSTIILMIFLIGIILLSIWTRSFIIGFLAAIINVFVFNYFFTEPRYTFEVYRFDYPITFIVSILTSILTSALLKQIKFQYSITKKQLYRTDLLFQFNDSIKQTYTVENLLINAGYQINQLLQQSITIYVINQSKVIKTIPLQNHIDNTTQQHEQALSWVIKNERQAGATTDTFPGINKWLIPIGTSPIKGILAIDYQSSQVINPYDASILESMLNELSLAVENVTLLKQTRESMLQAERQLTHSNFLRSISHDIRTPLTTIMGNLDILVSHSKDMSIIEKEQLLVHSFQESQYLYLLVTNILSLTKLQSSNVQIKLQPYLVSELVEEIDMILERRHLKKRITVSSSVNLQFIHIDSKLILQALFNLIENAVKHTSTDTKINLSIRYASYEQIEFAVIDEGPGISLEEQQKIFEPFYTGSNKYFKDNQKESMGLGLYLVQTILHKHQSNLQYKPNQPHGSIFYFNIYTDFNEGDV

SEQ ID NO: 12991 - protein, 487 aa, Staphylococcus aureus; identical to SEQ ID NO: 12397

SEQ ID NO: 12992 - protein, 118 aa, Staphylococcus aureus; identical to SEQ ID NO: 12394

SEQ ID NO: 12993 - protein, 425 aa, Staphylococcus aureus
MMKLIKNGKVLQNGELQQADILIDGKVIKQIAPAIEPSNGVDIIDAKGHFVSPGFVDVHVHLREPGGEYKETIETGTKAAARGGFTTVCPMPNTRPVPDSVEHFEALQKLIDDNAQVRVLPYASITTRQLGKELVDFPALVKEGAFAFTDDGVGVQTASMMYEGMIEAAKVNKAIVAHCEDNSLIYGGAMHEGKRSKELGIPGIPNICESVQIARDVLLAEAAGCHYHVCHVSTKESVRVIRDAKRAGIHVTAEVTPHHLLLTEDDIPGNNAIYKMNPPLRSTEDREALLEGLLDGTIDCIATDHAPHARDEKAQPMEKAPFGIVGSETAFPLLYTHFVKNGDWTLQQLVDYLTIKPCETFNLEYGTLKENGYADLTIIDLDSEQEIKGEDFLSKADNTPFIGYKVYGNPILTMVEGEVKFEGDK

SEQ ID NO: 12994 - protein, 187 aa, Staphylococcus aureus; identical to SEQ ID NO: 12178

SEQ ID NO: 12995 - protein, 920 aa, Staphylococcus aureus
MKKMDYKETLLMPKTDFPMRGGLPNKEPQIQEKWDAEDQYHKALEKNKGNETFILHDGPPYANGNLHMGHALNKILKDFIVRYKTMQGFYAPYVPGWDTHGLPIEQALTKKGVDRKKMSTAEFREKCKEFALEQIELQKKDFRRLGVRGDFNDPYITLKPEYEAAQIRIFGEMADKGLIYKGKKPVYWSPSSESSLAEAEIEYHDKRSASIYVAFDVKDDKGVVDADAKFIIWTTTPWTIPSNVAITVHPELKYGQYNVNGEKYIIAEALSDAVAEALDWDKASIKLEKEYTGKELEYVVAQHPFLDRESLVINGDHVTTDAGTGCVHTAPGHGEDDYIVGQKYELPVISPIDDKGVFTEEGGQFEGMFYDKANKAVTDLLTEKGALLKLDFITHSYPHDWRTKKPVIFRATPQWFASISKVRQDILDAIENTNFKVNWGKTRIYNMVRDRGEWVISRQRVWGVPLPVFYAENGEIIMTKETVNHVADLFAEHGSNIWFEREAKDLLPEGFTHPGSPNGTFTKETDIMDVWFDSGSSHRGVLETRPELSFPADMYLEGSDQYRGWFNSSITTSVATRGVSPYKFLLSHGFVMDGEGKKMSKSLGNVIVPDQVVKQKGADIARLWVSSTDYLADVRISDEILKQTSDVYRKIRNTLRFMLGNINDFNPDTDSIPESELLEVDRYLLNRLREFTASTINNYENFDYLNIYQEVQNFINVELSNFYLDYGKDILYIEQRDSHIRRSMQTVLYQILVDMTKLLAPILVHTAEEVWSHTPHVKEESVHLADMPKVVEVDQALLDKWRTFMNLRDDVNRALETARNEKVIGKSLEAKVTIASNDKFNASEFLTSFDALHQLFIVSQVKVVDKLDDQATAYEHGDIVIEHADGEKCERCWNYSEDLGAVDELTHLCPRCQQVVKSLV

SEQ ID NO: 12996 - protein, 6281 aa, Staphylococcus aureus
MGQANRLEDVQTVQTNGQALNNAMKGLRDSIANETTVKTSQNYTDASPNNQSTYNSAVSNAKGIINQTNNPTMDTSAITQATTQVNNAKNGLNGAENLRNAQNTAKQNLNTLSHLTNNQKSAISSQIDRAGHVSEVTATKNAATELNTQMGNLEQAIHDQNTVKQSVKFTDADKAKRDAYTNAVSRAEAILNKTQGANTSKQDVEAAIQNVSSAKNALNGDQNVTNAKNAAKNALNNLTSINNAQKRDLTTKIDQATTVAGVEAVSNTSTQLNTAMANLQNGINDKTNTLASENYHDADSDKKTAYTQAVTNAENILNKNSGSNLDKTAVENALSQVANAKGALNGNHNLEQAKSNANTTINGLQHLTTAQKDKLKQQVQQAQNVAGVDTVKSSANTLNGAMGTLRNSIQDNTATKNGQNYLDATERNKTNYNNAVDSANGVINATSNPNMDANAINQIATQVTSTKNALDGTHNLTQAKQTATNAIDGATNLNKAQKDALKAQVTSAQRVANVTSIQQTANELNTAMGQLQHGIDDENATKQTQKYRDAEQSKKTAYDQAVAAAKAILNKQTGSNSDKAAVDRALQQVTSTKDALNGDAKLAEAKAAAKQNLGTLNHITNAQRTDLEGQINQATTVDGVNTVKTNANTLDGAMNSLQGSINDKDATLRNQNYLDADESKRNAYTQAVTAAEGILNKQTGGNTSKADVDNALNAVTRAKAALNGADNLRNAKTSATNTIDGLPNLTQLQKDNLKHQVEQAQNVAGVNGVKDKGNTLNTAMGALRTSIQNDNTTKTSQNYLDASDSNKNNYNTAVNNANGVINATNNPNMDANAINGMANQVNTTKAALNGAQNLAQAKTNATNTINNAHDLNQKQKDALKTQVNNAQRVSDANNVQHTATELNSAMTALKAAIADKERTKASGNYVNADQEKRQAYDSKVTNAENIISGTPNATLTVNDVNSAASQVNAAKTALNGDNNLRVAKEHANNTIDGLAQLNNAQKAKLKEQVQSATTLDGVQTVKNSSQTLNTAMKGLRDSIANEATIKAGQNYTDASPNNRNEYDSAVTAAKAIINQTSNPTMEPNTITQVTSQVTTKEQALNGARNLAQAKTTAKNNLNNLTSINNAQKDALTRSIDGATTVAGVNQETAKATELNNAMHSLQNGINDETQTKQTQKYLDAEPSKKSAYDQAVNAAKAILTKASGQNVDKAAVEQALQNVNSTKTALNGDAKLNEAKAAAKQTLGTLTHINNAQRTALDNEITQATNVEGVNTVKAKAQQLDGAMGQLETSIRDKDTTLQSQNYQDADDAKRTAYSQAVNAAATILNKTAGGNTPKADVERAMQAVTQANTALNGIQNLDRAKQAANTAITNASDLNTKQKEALKAQVTSAGRVSAANGVEHTATELNTAMTALKRAIADKAETKASGNYVNADANKRQAYDEKVTAAENIVSGTPTPTLTPADVTNAATQVTNAKTQLNGNHNLEVAKQNANTAIDGLTSLNGPQKAKLKEQVGQATTLPNVQTVRDNAQTLNTAMKGLRDSIANEATIKAGQNYTDASQNKQTDYNSAVTAAKAIIGQTTSPSMNAQEINQAKDQVTAKQQALNGQENLRTAQTNAKQHLNGLSDLTDAQKDAVKRQIEGATHVNEVTQAQNNADALNTAMTNLKNGIQDQNTIKQGVNFTDADEAKRNAYTNAVTQAEQILNKAQGPNTSKDGVETALENVQRAKNELNGNQNVANAKTTAKNALNNLTSINNAQKEALKSQIEGATTVAGVNQVSTTASELNTAMSNLQNGINDEAATKAAQKYTDADREKQTAYNDAVTAAKTLLDKTAGSNDNKAAVEQALQRVNTAKTALNGDERLNEAKNTAKQQVATMSHLTDAQKANLTSQIESGTTVAGVQGIQANAGTLDQAMNQLRQSIASKDATKSSEDYQDANADLQNAYNDAVTNAEGIISATNNPEMNPDTINQKASQVNSAKSALNGDEKLAAAKQTAKSDIGRLTDLNNAQRTAANAEVDQAPNLAAVTAAKNKATSLNTAMGNLKHALAEKDNTKRSVNYTDADQPKQQAYDTAVTQAEAITNANGSNANETQVQAALNQLNQAKNDLNGDNKVAQAKESAKRALASYSNLNNAQSTAATSQIDNATTVAGVTAAQNTANELNTAMGQLQNGINDQNTVKQQVNFTDADQGKKDAYTNAVTNAQGILDKAHGQNMTKAQVEAALNQVTTAKNALNGDANVRQAKSDAKANLGTLTHLNNAQKQDLTSQIEGATTVNGVNGVKTKAQDLDGAMQRLQSAIANKDQTKASENYIDADPTKKTAFDNAITQAESYLNKDHGANKDKQAVEQAIQSVTSTENALNGDANLQRAKTEAIQAIDNLTHLNTPQKTALKQQVNAAQRVSGVTDLKNSATSLNNAMDQLKQAIADHDTIVASGNYTNASPDKQGAYTDAYNAAKNIVNGSPNVITNAADVTAATQRVNNAETGLNGDTNLATAKQQAKDALRQMTHLSDAQKQSITGQIDSATQVTGVQSVKDNATNLDNAMNQLRNSIANKDDVKASQPYVDADRDKQNAYNTAVTNAENIINATSQPTLDPSAVTQAANQVSTNKTALNGAQNLANKKQETTANINQLSHLNNAQKQDLNTQVTNAPNISTVNQVKTKAEQLDQAMERLINGIQDKDQVKQSVNFTDADPEKQTAYNNAVTAAENIINQANGTNANQSQVEAALSTVTTTKQALNGDRKVTDAKNNANQTLSTLDNLNNAQKGAVTGNINQAHTVAEVTQAIQTAQELNTAMGNLKNSLNDKDTTLGSQNFADADPEKKNAYNEAVHNAENILNKSTGTNVPKDQVEAAMNQVNATKAALNGTQNLEKAKQHANTAIDGLSHLTNAQKEALKQLVQQSTTVAEAQGNEQKANNVDAAMDKLRQSIADNATTKQNQNYTDASQNKKDAYNNAVTTAQGIIDQTTSPTLDPTVINQAAGQVSTTKNALNGNENLEAAKQQASQSLGSLDNLNNAQKQTVTDQINGAHTVDEANQIKQNAQNLNTAMGNLKQAIADKDATKATVNFTDADQAKQQAYNTAVTNAENIISKANGGNATQAEVEQAIKQVNAAKQALNGNANVQHAKDEATALINSSNDLNQAQKDALKQQVQNATTVAGVNNVKQTAQELNNAMTQLKQGIADKEQTKADGNFVNADPDKQNAYNQAVAKAEALISATPDVVVTPSEITAALNKVTQAKNDLNGNTNLATAKQNVQHAIDQLPNLNQAQRDEYSKQITQATLVPNVNAIQQAATTLNDAMTQLKQGIANKAQIKGSENYHDADTDKQTAYDNAVTKAEELLKQTTNPTMDPNTIQQALTKVNDTNQALNGNQKLADAKQDAKTTLGTLDHLNDAQKQALTTQVEQAPDIATVNNVKQNAQNLNNAMTNLNNALQDKTETLNSINFTDADQAKKDAYTNAVSHAEGILSKANGSNASQTEVEQAMQRVNEAKQALNGNDNVQRAKDAAKQVITNANDLNQAQKDALKQQVDAAQTVANVNTIKQTAQDLNQAMTQLKQGIADKDQTKANGNFVNADTDKQNAYNNAVAHAEQIISGTPNANVDPQQVAQALQQVNQAKGDLNGNHNLQVAKDNANTAIDQLPNLNQPQKTALKDQVSHAELVTGVNAIKQNADALNNAMGTLKQQIQANSQVPQSVDFTQADQDKQQAYNNAANQAQQIANGIPTPVLTPDTVTQAVTTMNQAKDALNGDEKLAQAKQEALANLDTLRDLNQPQRDALRNQINQAQALATVEQTKQNAQNVNTAMSNLKQGIANKDTVKASENYHDADADKQTAYTNAVSQAEGIINQTTNPTLNPDEITRALTQVTDAKNGLNGEAKLATEKQNAKDAVSGMTHLNDAQKQALKGQIDQSPEIATVNQVKQTATSLDQAMDQLSQAINDKAQTLADGNYLNADPDKQNAYKQAVAKAEALLNKQSGTNEVQAQVESITNEVNAAKQALNGNDNLANAKQQAKQQLANLTHLNDAQKQSFESQITQAPLVTDVTTINQKAQTLDHAMELLRNSVADNQTTLASEDYHDATAQRQNDYNQAVTAANNIINQTTSPTMNPDDVNGATTQVNNTKVALDGDENLAAAKQQANNRLDQLDHLNNAQKQQLQSQITQSSDIAAVNGHKQTAESLNTAMGNLINAIADHQAVEQRGNFINADTDKQTAYNTAVNEAAAMINKQTGQNANQTEVEQAITKVQTTLQALNGDHNLQVAKTNATQAIDALTSLNDPQKTALKDQVTAATLVTAVHQIEQNANTLNQAMHGLRQSIQDNAATKANSKYINEDQPEQQNYDQAVQAANNIINEQTATLDNNAINQAATTVNTTKAALHGDVKLQNDKDHAKQTVSQLAHLNNAQKHMEDTLIDSETTRTAVKQDLTEAQALDQLMDALQQSIADKDATRASSAYVNAEPNKKQSYDEAVQNAESIIAGLNNPTINKGNVSSATQAVISSKNALDGVERLAQDKQTAGNSLNHLDQLTPAQQQALENQINNATTRGEVAQKLTEAQALNQAMEALRNSIQDQQQTEAGSKFINEDKPQKDAYQAAVQNAKDLINQTNNPTLDKAQVEQLTQAVNQAKDNLHGDQKLADDKQHAVTDLNQLNGLNNPQRQALESQINNAATRGEVAQKLAEAKALDQAMQALRNSIQDQQQTESGSKFINEDKPQKDAYQAAVQNAKDLINQTGNPTLDKSQVEQLTQAVTTAKDNLHGDQKLARDQQQAVTTVNALPNLNHAQQQALTDAINAAPTRTEVAQHVQTATELDHAMETLKNKVDQVNTDKAQPNYTEASTDKKEAVDQALQAAESITDPTNGSNANKDAVDQVLTKLQEKENELNGNERVAEAKTQAKQTIDQLTHLNADQIATAKQNIDQATKLQPIAELVDQATQLNQSMDQLQQAVNEHANVEQTVDYTQADSDKQNAYKQAIADAENVLKQNANKQQVDQALQNILNAKQALNGDERVALAKTNGKHDIDQLNALNNAQQDGFKGRIDQSNDLNQIQQIVDEAKALNRAMDQLSQEITDNEGRTKGSTNYVNADTQVKQVYDETVDKAKQALDKSTGQNLTAKQVIKLNDAVTAAKKALNGEERLNNRKAEALQRLDQLTHLNNAQRQLAIQQINNAETLNKASRAINRATKLDNAMGAVQQYIDEQHLGVISSTNYINADDNLKANYDNAIANAAHELDKVQGNAIAKAEAEQLKQNIIDAQNALNGDQNLANAKDKANAFVNSLNGLNQQQQDLAHKAINNADTVSDVTDIVNNQIDLNDAMETLKHLVDNEIPNAEQTVNYQNADDNAKTNFDDAKRLANTLLNSDNTNVNDINGAIQAVNDAIHNLNGDQRLQDAKDKAIQSINQALANKLKEIEASNATDQDKLIAKNKAEELANSIINNINKATSNQAESQVQTAGNHAIEQVHANEIPKAKIDANKDVDKQVQALIDEIDRNPNLTDKEKQALKDRINQILQQGHNGINNAMTKEEIEQAKAQLAQALQDIKDLVKAKEDAKQDVDKQVQALIDEIDQNPNLTDKEKQALKDRINQILQQGHNDINNALTKEEIEQAKAQLAQALQDIKDLVKAKEDAKNAIKALANAKRDQINSNPDLTPEQKAKALKEIDEAEKRALQNVENAQTIDQLNRGLNLGLDDIRNTHVWEVDEQPAVNEIFEATPEQILVNGELIVHRDDIITEQDILAHINLIDQLSAEVIDTPSTATISDSLTAKVEVTLLDGSKVIVNVPVKVVEKELSVVKQQAIESIENAAQQKINEINNSVTLTLEQKEAAIAEVNKLKQQAIDHVNDAPDVHSVEEIQQQEQAHIEQFNPEQFTIEQAKSNAIKSIEDAIQHMIDEIKARTDLTDKEKQEAIAKLNQLKEQAIQAIQRAQSIDEISEQLEQFKAQMKAANPTAKELAKRKQEAISRIKDFSNEKINSIRNSEIGTADEKQAAMNQINEIVLETIRDINNAHTLQQVEAALNNGIARISAVQIVTSDRAKQSSSTGNESNSHLTIGYGTANHPFNSSTIGHKKKLDEDDDIDPLHMRHFSNNFGNVIKNAIGVVGISGLLASFWFFIAKRRRKEDEEEELEIRDNNKDSIKETLDDTKHLPLLFVKRRRKEDEEDVTVEEKDSLNNGESLDKVKHTPFFLPKRRRKEDEEDVEVTNENTDEKVLKDNEHSPLLFAKRRKDKEEDVETTTSIESKDEDVPLLLAKKKNQKDNQSKDKKSASKNTSKKVAAKKKKKKAKKNKK

SEQ ID NO: 12997 - protein, 887 aa, Staphylococcus aureus; identical to SEQ ID NO: 5824

SEQ ID NO: 12998 - protein, 644 aa, Staphylococcus aureus; identical to SEQ ID NO: 5670

SEQ ID NO: 12999 - protein, 608 aa, Staphylococcus aureus; identical to SEQ ID NO: 5677

SEQ ID NO: 13000 - protein, 235 aa, Staphylococcus aureus; identical to SEQ ID NO: 12674

SEQ ID NO: 13001 - protein, 148 aa, Staphylococcus aureus; identical to SEQ ID NO: 5673

SEQ ID NO: 13002 - protein, 701 aa, Staphylococcus aureus
MNNGFFNSDFDSIFRRMMKDMQGSNQVGNKKYYINGKEVSPEELAQLTQQGGNHSAEQSAQAFQQAAQRQQGQQGGNGNYLEQIGRNLTQEARDGLLDPVIGRDKEIQETAEVLSRRTKNNPILVGEAGVGKTAIVEGLAQAIVEGNVPAAIKDKEIISVDISSLEAGTQYRGAFEENIQKLIEGVKSSQNAVLFFDEIHQIIGSGATGSDSGSKGLSDILKPALSRGEISIIGATTQDEYRNNILKDAALTRRFNEVLVNEPSAKDTVEILKGIREKFEEHHQVKLPDDVLKACVDLSIQYIPQRLLPDKAIDVLDITAAHLSAQSPAVDKVETEKRISELENDKRKAVSAEEYKKADDIQNEIKSLQDKLENSNGEHTAVATVHDISDTIQRLTGIPVSQMDDNDIERLKNISNRLRSKIIGQDQAVEMVSRAIRRNRAGFDDGNRPIGSFLFVGPTGVGKTELAKQLAIDLFGNKDALIRLDMSEYSDTTAVSKMIGTTAGYVGYDDNSNTLTEKVRRNPYSVILFDEIEKANPQILTLLLQVMDDGNLTDGQGNVINFKNTIIICTSNAGFGNGNDAEEKDIMHEMKKFFRPEFLNRFNGIVEFLHLDKDALQDIVNLLLDDVQVTLDKKGITMDVSQDAKDWLIEEGYDEELGARPLRRIVEQQVRDKITDYYLDHTDVKHVDIDVEDNELVVKGK

SEQ ID NO: 13003 - protein, 876 aa, Staphylococcus aureus
MEMKPKYDPREVEAGRYEEWVKNGYFKPSEDKSKETYTIVIPPPNVTGKLHLGHAWDTTLQDIITRMKRMQGYDTLYLPGMDHAGIATQAKVEAKLNEQGITRYDLGREKFLEQAWDWKEEYASFIRAQWAKLGLGLDYSRERFTLDEGLSKAVKKVFVDLYNKGIIYRGERIINWDPKARTALSDIEVIHEDVQGAFYHFKYPYADGEGFIEIATTRPETMLGDTAIVVNPNDERYKDVIGKTVILPIVGRELPILADEYVDIDFGSGAMKVTPAHDPNDFEIGQRHQLENIIVMDENGKMNDKAGKYEGMDRFDCRKQLVKDLKEQDLVIKIEDHVHSVGHSERSGAVVEPYLSTQWFVRMEDLAKRSLDNQKTDDRIDFYPQRFEHTFNQWMENIRDWTISRQLWWGHQIPAWYHKETGEIYVGEEAPTDIENWQQDEDVLDTWFSSALWPFSTLGWPDLESEDFKRYYPTNALVTGYDIIFFWVARMIFQGLEFTDRRPFNDVLLHGLVRAEDGRKMSKSLGNGVDPMDVIDEYGADSLRYFLATGSSPGHDLRYSTEKVESVWNFINKIWNGARFSLMNIGEDFKVEDIDLSGNLSLADKWILTRLNETIATVTDLSDKYEFGEVGRALYNFIWDDFCDWYIEMSKIPMNSNDEEQKQVTRSVLSYTLDNIMRMLHPFMPFVTEKIWQSLPHEGDTIVKASWPEVRESLIFEESKQTMQQLVEIIKSVRQSRVEVNTPLSKEIPILIQAKDKEIETTLSQNKDYLIKFCNPSTLNISTDVEIPEKAMTSVVIAGKVVLPLEGLIDMDKEISRLEKELAKLQSELDRVDKKLSNENFVSKAPEKVINEEKRKKQDYQEKYDGVKARIEQLKA

SEQ ID NO: 13004 - protein, 324 aa, Staphylococcus aureus; identical to SEQ ID NO: 12634

SEQ ID NO: 13005 - protein, 118 aa, Staphylococcus aureus; identical to SEQ ID NO: 12630

SEQ ID NO: 13006 - protein, 66 aa, Staphylococcus aureus; identical to SEQ ID NO: 5732

SEQ ID NO: 13007 - protein, 200 aa, Staphylococcus aureus; identical to SEQ ID NO: 12627

SEQ ID NO: 13008 - protein, 636 aa, Staphylococcus aureus; identical to SEQ ID NO: 5838

SEQ ID NO: 13009 - protein, 166 aa, Staphylococcus aureus
MKSRLPHSEESHTFHGRDVYAYNGARLAANKIAFERLGQAINVDSIEALEIREVTKNEDSVTGSIDILDIRFGSLWTNIPLAFLKSLEIVHGNNLVVTIYHQDKKVYQNIIKFARSFADVNVGEPLVYVNSLVNIGVAVNQDSFSDLYHIGTGNDWTIHLSKAPSI

SEQ ID NO: 13010 - protein, 308 aa, Staphylococcus aureus
MDEQQQLTNAYHSNKLSHAYLFEGDDAQTMKQVAINFAKLILCQTDSQCETKVSTYNHPDFMYISTTENAIKKEQVEQLVRHMNQLPIESTNKVYIIEDFEKLTVQGENSILKFLEEPPDNTIAILLSTKPEQILDTIHSRCQHVYFKPIDKEKFINRLVEQNMSKPVAEMISTYTTQIDNAMALNEEFDLLALRKSVIRWCELLLTNKPMALIGIIDLLKQAKNKKLQSLTIAAVNGFFEDIIHTKVNVEDKQIYSDLKNDIDQYAQKLSFNQLILMFDQLTEAHKKLNQNVNPTLVFEQIVIKGVS

SEQ ID NO: 13011 - protein, 208 aa, Staphylococcus aureus; identical to SEQ ID NO: 12131

SEQ ID NO: 13012 - protein, 178 aa, Staphylococcus aureus; identical to SEQ ID NO: 12133

SEQ ID NO: 13013 - protein, 657 aa, Staphylococcus aureus
MAKETFYITTPIYYPSGNLHIGHAYSTVAGDVIARYKRMQGYDVRYLTGTDEHGQKIQEKAQKAGKTEIEYLDEMIAGIKQLWAKLEISNDDFIRTTEERHKHVVEQVFERLLKQGDIYLGEYEGWYSVPDETYYTESQLVDPQYENGKIIGGKSPDSGHEVELVKEESYFFNISKYTDRLLEFYDQNPDFIQPPSRKNEMINNFIKPGLADLAVSRTSFNWGVHVPSNPKHVVYVWIDALVNYISALGYLSDDESLFNKYWPADIHLMAKEIVRFHSIIWPILLMALDLPLPKKVFAHGWILMKDGKMSKSKGNVVDPNILIDRYGLDATRYYLMRELPFGSDGVFTPEAFVERTNFDLANDLGNLVNRTISMVNKYFDGELPAYQGPLHELDEEMEAMALETVKSYTESMESLQFSVALSTVWKFISRTNKYIDETTPWVLAKDDSQKDMLGNVMAHLVENIRYAAVLLRPFLTHAPKEIFEQLNINNPQFMEFSSLEQYGVLNESIMVTGQPKPIFPRLDSEAEIAYIKESMQPPATKEEKEEIPSKPQIDIKDFDKVEIKAATIIDAEHVKKSDKLLKIQVDLDSEQRQIVSGIAKFYTPDDIIGKKVAVVTNLKPAKLMGQKSEGMILSAEKDGVLTLVSLPSAIPNGAVIK

SEQ ID NO: 13014 - protein, 110 aa, Staphylococcus aureus; identical to SEQ ID NO: 12422

SEQ ID NO: 13015 - protein, 142 aa, Staphylococcus aureus
MTSMNPNITYTTYTGVSSHTGPLGYENPDLGTFFLMATTSRIIGHDAREEWRKNDGVVPVISSLHPSNQPFVNVTNDEPATRRGIWQVKPIIQGWDHVDFIGVDFLDFKRKGAELANFYTGIINDLLRVEATESKGTQLKAS

SEQ ID NO: 13016 - protein, 281 aa, Staphylococcus aureus; identical to SEQ ID NO: 12170

SEQ ID NO: 13017 - protein, 304 aa, Staphylococcus aureus
MTNKVVILGSTNVDQFLTVERYAQPGETLHVEEAQKAFGGGKGANQAIATARMQADTTFITKIGTDGVADFILEDFKVAHIDTSYIIKTAEAKTGQAFITVNAEGQNTIYVYGGANMTMTPEDVINAKDAIINADFVVAQLEVPIPAIISAFEIAKAHGVTTVLNPAPAKALPNELLSLIDIIVPNETEAELLSGIKVTNEQSMKDNANYFLSIGIKTVLITLGKQGTYFATKNQSQHIEAYKVNAIDTTAAGDTFIGAFVSRLNKSQDNLADAIDFGNKASSLTVQKHGAQASIPLLEEVNQV

SEQ ID NO: 13018 - protein, 263 aa, Staphylococcus aureus
MSNKYKEQAQDILTAVGGVENIVDATYDTKCITIHMQHTIPSTANEVKQIVDVTSVAENDTQLVIKLNGNVDEVYQQLQRLIKNANVEESENTDNINSQDTSYTPQVKVTTPILVKAPIAGRRILLKEVRDSIFREKMVGEGLAIKAHEESKVIAPFNGLISMIVPTKHAVGIQSEDGVDIVIHIGVNTVDLEGKGFKCFVKQNDHVEAGQTLLQFDQQYIQQQGYNADVIVVISNSADLGKVELTMNEIITTEDVIFKIFKN

SEQ ID NO: 13019 - protein, 44 aa, Staphylococcus aureus; identical to SEQ ID NO: 12465

SEQ ID NO: 13020 - protein, 613 aa, Staphylococcus aureus
MSQFLTQLKDNVLVADGAIGTILYSEGLDTCPEAYNLSHPDKVERIHRSYIEAGADVIQTNTYGANFEKLKRFGLEDKVKAIHQAAVRIAKKAANKDTYILGTVGGFRGIKQEDISLQTILYHTEIQIDTLIEEGVDALLFETYYDLEELTNVISRTRKKYDIPIIAQLTASNTNYLVNGQAINEGLKQLVQCGANIVGLNCHHGPHHMQESFTHIELPEHAFLSCYPNASLLDIENSEFKYSDNAQYFGQVAQNLIREGVRLIGGCCGTTPEHIKFIKESIQTLKPVNDKKVIPIPTKALFNPSQNKVRQSLTSKVQERPTVIIELDTPKHLDTDRFFENIAKLDKANVDAVTLADNSLATVRISNIAAASLIKQYYNIEPLVHITCRDRNLIGLQSHLLGLSLIGVNEILAITGDPSKVGHLPGATNVYDVNSKGLTELALRFNQGINTDGDALKKRTHFNIAGAFNPNVRKLYGAVKRLEKKIESGMSYFITQPVYSKEKIIEIYHATKHLNKPFFIGIMPIASYKNALFLHNEVPGIKMSDEILQQFEAVKDDKAKTRELSLKLSKDLIDTVHEYFNGLYIITPFQNVEDSLELAAYSKSITAHKEAIL

SEQ ID NO: 13021 - protein, 80 aa, Staphylococcus aureus; identical to SEQ ID NO: 12411

SEQ ID NO: 13022 - protein, 167 aa, Staphylococcus aureus; identical to SEQ ID NO: 5744

SEQ ID NO: 13023 - protein, 578 aa, Staphylococcus aureus
MLVREDTLVKHYLTKFVAMLITAAMVCSFGLLKSQAAEQQSISDVYSVITDAKSALSNNSISNDNKQKAIEQVVSAVKKLSLEDNSESNAVKSDVRKLEDAKANDNQKDTLSQLTKSLIAYEEKLASKDAGSKIKLLQQQVDAKDAAMTKAIKDKNKAELESLNNSLNQIWTSNETVIRNYDANQYGQIEVALLQLRIAIHKSPLDTAKVSHAWTTFKSNIDHVDKKSNTSANDQYHVSQLNDALEKAIKAIDDNQLSDADAALTHFIETWPYVEGQIQTKDGALYTKIEDKIPYYQSVLDEHNKAHVKDGLVDLNNQIKEVVGHSYSFVDVMIIFLREGLEVLLIVMTLTTMTRNVKDKKGTASVIGGAIAGLVLSIILAITFVETLGNSGILRESMEAGLGIVAVILMFIVGVWMHKRSNAKRWNDMIKNMYANAISNGNLVLLATIGLISVLREGVEVIIFYMGMIGELATKDFIIGIALAIVILIIFALLFRFIVKLIPIFYIFRVLSIFIFIMGFKMLGVSIQKLQLLGAMPRHVIEGFPTINWLGFYPSYEPLIAQGAYIMVVAILIFKFKK

SEQ ID NO: 13024 - protein, 98 aa, Staphylococcus aureus; identical to SEQ ID NO: 12413

SEQ ID NO: 13025 - protein, 365 aa, Staphylococcus aureus; identical to SEQ ID NO: 5593

SEQ ID NO: 13026 - protein, 62 aa, Staphylococcus aureus; identical to SEQ ID NO: 12129

SEQ ID NO: 13027 - protein, 77 aa, Staphylococcus aureus
MVLSNSVSTVIVDYRGLTVAEVTDLRSQLREAGVESKVSLNTMVRRAAEKAGIEGLAEFLTGPTAIATSSDDAVAAV

SEQ ID NO: 13028 - protein, 99 aa, Staphylococcus aureus; identical to SEQ ID NO: 12640

SEQ ID NO: 13029 - protein, 205 aa, Staphylococcus aureus; identical to SEQ ID NO: 12561

SEQ ID NO: 13030 - protein, 67 aa, Staphylococcus aureus; identical to SEQ ID NO: 5863

SEQ ID NO: 13031 - protein, 55 aa, Staphylococcus aureus
MNKGTVYKEGSATEIFVNAEEFPRIGLDLPFPININQMLGHHTSFLTYEGLVDQL

SEQ ID NO: 13032 - protein, 66 aa, Staphylococcus aureus
MIKSDFFVINKTDLAPYVGASLEQMAEDTKVFRGKRPFTFTNLKTDEGLDEVIDWIERDTLLKGLS

SEQ ID NO: 13033 - protein, 132 aa, Staphylococcus aureus
MTMTDPIADMLTRVRNANMVRHEKLELPASNIKKEIAEILKSEGFIKNVEYVEDDKQGVLRLFLKYGQNDERVITGLKRISKPGLRVYAKASEMPKVLNGLGIALVSTSEGVITDKEARKGNVGGEIIAYVW

SEQ ID NO: 13034 - protein, 84 aa, Staphylococcus aureus
MSRVGKKIIDIPSDVTVTFDGNHVTVKGPKGELSRTLNERMTFKQEDNTIEVVRPSDSKEDRTNHGTTRALLNNMVQGVSQGYV

SEQ ID NO: 13035 - protein, 77 aa, Staphylococcus aureus
MQGKDLILNVGYSHPVEIKAEENITFSVEKNTVVKVEGISKEQVGALASNIRSVRPPEPYKGKGIRYQGEYVRRKAA

SEQ ID NO: 13036 - protein, 126 aa, Staphylococcus aureus
MKGMTTQLNINSVIENAKRVITPLSPISIFAARNPWEGLEADTFEDVAKWLRDVRDVDIFPNKALIESAVARGELDESVFNQLVTDMLLEHHYNIPQHYINLYIDNIKTLKDVPASYIIIQMLVPI

SEQ ID NO: 13037 - protein, 114 aa, Staphylococcus aureus
MGIIKMKLPIEDLEKKQKEKVKPTKMVTRQNRQTIKTELDLRGYRYEDALIELDQYLDQAVLSNYEQVYIIHGKGTGALQKGVQQHLKKHKSVSDFRGGMPSEGGFGVTVATLK

SEQ ID NO: 13038 - protein, 89 aa, Staphylococcus aureus; identical to SEQ ID NO: 12557

SEQ ID NO: 13039 - protein, 234 aa, Staphylococcus aureus; identical to SEQ ID NO: 12661

SEQ ID NO: 13040 - protein, 246 aa, Staphylococcus aureus; identical to SEQ ID NO: 12986

SEQ ID NO: 13041 - protein, 100 aa, Staphylococcus aureus; identical to SEQ ID NO: 12491

SEQ ID NO: 13042 - protein, 496 aa, Staphylococcus aureus
MNYRDKIQKFSIRKYTVGTFSTVIATLVFLGFNTSQAHAAETNQPASVVKQKQQSNNEQTENRESQVQNSQNSQNGQSLSATHENEQPNISQANSLDQKVAQSSTTNDEQPSSENVNTKKDSATAATTQPDKEQSQHKQNESQSANKNGNDNRAAHVENHEANVVTASDSSDNGNVQHDRNELQAFFDANYHDYRFIDRENADSGTFNYVKGIFDKINTLLGSNDPINNKDLQLAYKELEQAVALIRTMPQRQQTSRRSNRIQTRSVESRAAEPRSVSDYQNANSSYYVENANDGSGYPVGTYINASSKGAPYNLPTTPWNTLKASDSKEIALMTAKQTGDGYQWVIKFNKGHAPHQNMIFWFALPADQVPVGRTDFVTVNSDGTNVQWSHGAGAGANKPLQQMWEYGVNDPHRSHDFKIRNRSGQVIYDWPTVHIYSLEDLSRASDYSSEAGATPATKAFGRQNYEYINGQKPAESPGVPKVYTFIRPSDASYPI

SEQ ID NO: 13043 - protein, 219 aa, Staphylococcus aureus; identical to SEQ ID NO: 12168

SEQ ID NO: 13044 - protein, 174 aa, Staphylococcus aureus; identical to SEQ ID NO: 12454

SEQ ID NO: 13045 - protein, 64 aa, Staphylococcus aureus; identical to SEQ ID NO: 5476

SEQ ID NO: 13046 - protein, 323 aa, Staphylococcus aureus; identical to SEQ ID NO: 5445

SEQ ID NO: 13047 - protein, 312 aa, Staphylococcus aureus; identical to SEQ ID NO: 12889

SEQ ID NO: 13048 - protein, 94 aa, Staphylococcus aureus; identical to SEQ ID NO: 12142

SEQ ID NO: 13049 - protein, 146 aa, Staphylococcus aureus; identical to SEQ ID NO: 5540

SEQ ID NO: 13050 - protein, 430 aa, Staphylococcus aureus; identical to SEQ ID NO: 12226

SEQ ID NO: 13051 - protein, 242 aa, Staphylococcus aureus
MKHQSIVNLKSLNVLPDKNNDWINQRDINYENYLPMYDSKDIENSIYLDQFNGVNSARDNWVTNFSNEKALVNAKLLVDNYNSEIDRLIDILDSRERINLVNKDETFISWTRGLTQKFSKGKNISINPERIVKFMHRPFTKKWIVYDKNIMEMPSRYYNIMENTGQVIYIQGQGMNKEFSAMITDILPNFQFIGNGKGFATYKGKDSLRLVDNISNSFKKKINLNSEEIVYYIYAILHHKYY

SEQ ID NO: 13052 - protein, 230 aa, Staphylococcus aureus; identical to SEQ ID NO: 12784

SEQ ID NO: 13053 - protein, 143 aa, Staphylococcus aureus; identical to SEQ ID NO: 12451

SEQ ID NO: 13054 - protein, 182 aa, Staphylococcus aureus; identical to SEQ ID NO: 5254

SEQ ID NO: 13055 - protein, 325 aa, Staphylococcus aureus; identical to SEQ ID NO: 12738

SEQ ID NO: 13056 - protein, 310 aa, Staphylococcus aureus; identical to SEQ ID NO: 12513

SEQ ID NO: 13057 - protein, 560 aa, Staphylococcus aureus
MSSSTSESTSLSDSTSESGSTSTSLSNSTSGSTSISTSTSISESTSTFKSESVSTSLSMSTSTSLSDSTSLSTSLSDSTSDSKSDSLSTSMSTSDSISTSKSDSISTSTSLSGSTSESESDSTSSSESKSDSTSMSISMSQSTSGSTSTSTSTSLSDSTSTSLSLSASMNQSGVDSNSASQSASNSTSTSTSESDSQSTSSYTSQSTSQSESTSTSTSLSDSTSISKSTSQSGSVSTSASLSGSESESDSQSISTSASESTSESASTSLSDSTSTSNSGSASTSTSLNNSASASESDLSSTSLSDSTSASMQSSESDSQSTSASLSDSLSTSTSNRMSTIASLSTSVSTSESGSTSESTSESDSTSTSLSDSQSTSRSTSASGSASTSTSTSDSRSTSASTSTSMRTSTSDSQSMSLSTSTSTSMSDSTSLSDSVSDSTSDSTSASTSGSMSVSISLSDSTSTSTSASEVMSASISDSQSMSESVNDSESVSESNSESDSKSMSGSTSVSDSGSLSVSTSLRKSESVSESSSLSCSQSMSDSVSTNDSSSLSVSTLLRSL

SEQ ID NO: 13058 - protein, 432 aa, Staphylococcus aureus
MDTSKQFRGDNRLLLGIVLGVITFWLFAQSLVNLVVPLQSTYSSDVGTINIAVSLSALFAGLFIVGAGDVADKFGRVKITYVGLILNVVGSLLIIITPLPAFLIIGRIIQGLSAACIMPSTLAIINEYYIGTRRQRALSYWSIGSWGGSGICTLFGGLMATYIGWRSIFVVSILLTLLAMYLIKHAPETKAEPIKGMKAEAKKFDVIGLVILVVTMLSLNVIITQTSHFGLVSPLILGLIVVFICSLVGFVYYENKIKHPLVDFSIFKNRGYSGATISNFLLNGVAGGALIVINTYYQQQLGFNSSQTGYISLTYLITVLSMIRVGEKILSQHGPKRPLLLGSGFTVIGLILLSLTFLPEVWYIISSIVGYLLFGTGLGLYATPSTDTAVASAPDDKSGVASSVYKMASSLGNAFGVAISGTVYTVLAANLN

SEQ ID NO: 13059 - protein, 67 aa, Staphylococcus aureus
MVRKLVGGNYRVLIPFSTVIGAWLLLVADLLGRVIQPPLEIPANAILMIVGGPMLIYLICQSQRNRI

SEQ ID NO: 13060 - protein, 259 aa, Staphylococcus aureus
MMIKNKKKLLFLCLLVILIATAYISFVTGTIKLSFNDLFTKFTTGSNEAVDSIIDLRLPRILIALMVGAMLAVSGALLQAALQNPLAEANIIGVSSGALIMRALCMLFIPQLYFYLPLLSFIGGLIPFLIIILLHSKFRFNAVSMILVGVALFVLLNGVLEILTQNPLMKIPQGLTMKIWSDVYILAVSALLGLILTLLLSPKLNLLNLDDIQARSIGFNIDRYRWLTGLLAVFLASATVAIVGQLAFLGIIVHMWLES

SEQ ID NO: 13061 - protein, 215 aa, Staphylococcus aureus
MWKEKVQQYEDQIINDLKGLLAIESVRDDAKASEDAPVGPGPRKALDYMYEIAHRDGFTTHDVDHIAGRIEAGKGNDVLGILCHVDVVPAGDGWDSNPFEPVVTEDAIIARGTLDDKGPTIAAYYAIKILEDMNVDWKKRIHMIIGTDEESDWKCTDRYFKTEEMPTLGFAPDAEFPCIHGEKGITTFDLVQNKLTEDQDELDYELGTELEFVSY

SEQ ID NO: 13062 - protein, 398 aa, Staphylococcus aureus; identical to SEQ ID NO: 12212

SEQ ID NO: 13063 - protein, 308 aa, Staphylococcus aureus; identical to SEQ ID NO: 13010

SEQ ID NO: 13064 - protein, 321 aa, Staphylococcus aureus; identical to SEQ ID NO: 12150

SEQ ID NO: 13065 - protein, 110 aa, Staphylococcus aureus; identical to SEQ ID NO: 12127

SEQ ID NO: 13066 - protein, 455 aa, Staphylococcus aureus
MAFEGLSERLQATMQKMRGKGKLTEADIKIMMREVRLALLEADVNFKVVKEFIKTVSERALGSDVMQSLTPGQQVIKIVQDELTQLMGGENTSINMSNKPPTVVMMVGLQGAGKTTTAGKLALLMRKKYNKKPMLVAADIYRPAAINQLQTVGKQIDIPVYSEGDQVKPQQIVTNALKHAKEEHLDFVIIDTAGRLHIDEALMNELKEVKDIAKPNEIMLVVDSMTGQDAVNVAESFDDQLDVTGVTLTKLDGDTRGGAALSIRSVTQKPIKFVGMSEKLDGLELFHPERMASRILGMGDVLSLIEKAQQDVDQEKAKDLEKKMRESSFTLDDFLEQLDQVKNLGPLDDIMKMIPGMNKMKGLDKLNMSEKQIDHIKAIIQSMTPAERNNPDTLNVSRKKRIAKGSGRSLQEVNRLMKQFNDMKKMMKQFTGGGKGKKGKRNQMQNMLKGMNLPF

SEQ ID NO: 13067 - protein, 313 aa, Staphylococcus aureus; identical to SEQ ID NO: 12210

SEQ ID NO: 13068 - protein, 255 aa, Staphylococcus aureus
MSDFQREQRKNEHVEIAMAQSDAMHSDFDKMRFVHHSIPSINVNDIDLTSQTPDLTMAYPVYINAMTGGSEWTKNINEKLAVVARETGLAMAVGSTHAALRNPRMAETFTIARKMNPEGMIFSNVGADVPVEKALEAVELLEAQALQIHVNSPQELVMPEGNREFVTWLDNIAWIVSRVSVPVIIKEVGFGMSKELMHDLQQIGVKYVDVSGKGGTNFVDIENERRANKDMDYLSSWGQSTVESLLETTAYQSKI

SEQ ID NO: 13069 - protein, 179 aa, Staphylococcus aureus; identical to SEQ ID NO: 12546

SEQ ID NO: 13070 - protein, 325 aa, Staphylococcus aureus; identical to SEQ ID NO: 5783

SEQ ID NO: 13071 - protein, 149 aa, Staphylococcus aureus; identical to SEQ ID NO: 12588

SEQ ID NO: 13072 - protein, 332 aa, Staphylococcus aureus
MTKITVFGMGSFGTALANVLAENGHDVLMWGKNQDAVDELNTCHTNKKYLKYAKLDVNIIATSDMTKAIQFADIYLMALPTKAMREVASQINDKLTSKKTFIHVAKGIENGTFKRVSEMIEDSISPEYNAGIGVLSGPSHAEEVVVKQPTTVAASSKDKSVSKLTQDLFMNDYLRVYTNDDLIGVELGGALKNIIAVASGIVAGIGYGDNAKAALMTRGLAEISRLGEKLGADPMTFLGLGGIGDLIVTCTSTHSRNFTLGYKLGQGESMDQALSEMNMVVEGIYTTKSVYHLAKEKNVDMPITNALYRVLFENISVKECVKDLMERDKKSE

SEQ ID NO: 13073 - protein, 90 aa, Staphylococcus aureus; identical to SEQ ID NO: 5313

SEQ ID NO: 13074 - protein, 210 aa, Staphylococcus aureus; identical to SEQ ID NO: 12972

SEQ ID NO: 13075 - protein, 61 aa, Staphylococcus aureus
MIKPGQELVVDKKQPANHADANKAQALPETGEENPFIGTTVFGGLSLALGAALLAGRRREL

SEQ ID NO: 13076 - protein, 294 aa, Staphylococcus aureus
MPNWEPGKKVHLVGHSMGGQTIRLMEEFLRNGNKEEIAYHKAHGGEISPLFTGGHNNMVASITTLATPHNGSQAADKFGNTEAVRKIMFALNRFMGNKYSNIDLGLTQWGFKQLPNESYIDYIKRVSKSKIWTSDDNAAYDLTLDGSAKLNNMTSMNPNITYTTYTGVSSHTGPLGYENPDLGTFFLMATTSRIIGHDAREEWRKNDGVVPVISSLHPSNQPFVNVTNDEPATRRGIWQVKPIIQGWDHVDFIGVDFLDFKRKGAELANFYTGIINDLLRVEATESKGTQLKAS

SEQ ID NO: 13077 - protein, 55 aa, Staphylococcus aureus
MAPISPKNYEITDYLLEKACERKGIPFEPKEIDNEAEIQAKQVLIDRANRQKKSR

SEQ ID NO: 13078 - protein, 194 aa, Staphylococcus aureus
MHELTIYHFMSDKLNLYSDIGNIIALRQRAKKRNIKVNVVEINETEGITFDECDIFFIGGGSDREQALATKELSKIKTPLKEAIEDGMPGLTICGGYQFLGKKYITPDGTELEGLGILDFYTESKTNRLTGDIVIESDTFGTIVGFENHGGRTYHDFGTLGHVTFGYGNNDEDKKEGIHYKNLLGTYLHGTNFT

SEQ ID NO: 13079 - protein, 825 aa, Staphylococcus aureus
MSLNLHEKAHGPHGLVAGTTGSGKSEIIQSYILSLAINFHPHEVAFLLIDYKGGGMANLFKDLVHLVGTITNLDGDEAMRALTSIKAELRKRQRLFGEHDVNHINQYHKLFKEGIATEPMPHLFIISDEFAELKSEQPDFMKELVSTARIGRSLGIHLILATQKPSGVVDDQIWSNSKFKLALKVQDRQDSNEILKTPDAADITLPGRAYLQVGNNEIYELFQSAWSGATYDIEGDKLEVEDKTIYMINDYGQLQAINKDLSGLEDEETKENQTELEAVIDHIESITTRLEIEEVKRPWLPPLPENVYQEDLVETDFRKLWSDDAKEVELTLGLKDVPEEQYQGPMVLQLKKAGHIALIGSPGYGRTTFLHNIIFDVARHHRPDQAHMYLFDFGTNGLMPVTDIPHVADYFTVDQEDKIAKAIRIFNDEIDRRKKILSQYRVTSISEYRKLTGETIPHVFILIDNFDAVKDSPFQEVFENMMIKMTREGLALDMQVTLTASRANAMKTPMYINMKTRIAMFLYDKSEVSNVVGQQKFAVKDVVGRALLSSDDNVSFHIGQPFKHDETKSYNDQINDEVSAMTEFYKGETPNDIPMMPDEIKYEDYRESLNLPDIVANGALPIGLDYEGVTLQKIKLTEPAMISSENPREIAHIAEIMMKEIDILNEKYAICIADSSGEFKAYRHQVANFAEEREDIKAIHQLMIEDLKQREMDGPFEKDSLYIINDFKTFIDCTYIPEDDVKKLITKGPELGLNILFVGIHKELIDAYDKQIDVARKMINQFSIGIRISDQQFFKFRFIQREPVIKENEAYMVANQAYQKIRWFK

SEQ ID NO: 13080 - protein, 875 aa, Staphylococcus aureus
MTQANTALNGIQNLDRAKQAANTAITNASDLNTKQKEALKAQVTSAGRVSAANGVEHTATELNTAMTALKRAIADKAETKASGNYVNADANKRQAYDEKVTAAENIVSGTPTPTLTPADVTNAATQVTNAKTQLNGNHNLEVAKQNANTAIDGLTSLNGPQKAKLKEQVGQATTLPNVQTVRDNAQTLNTAMKGLRDSIANEATIKAGQNYTDASQNKQTDYNSAVTAAKAIIGQTTSPSMNAQEINQAKDQVTAKQQALNGQENLRTAQTNAKQHLNGLSDLTDAQKDAVKRQIEGATHVNEVTQAQNNADALNTAMTNLKNGIQDQNTIKQGVNFTDADEAKRNAYTNAVTQAEQILNKAQGPNTSKDGVETALENVQRAKNELNGNQNVANAKTTAKNALNNLTSINNAQKEALKSQIEGATTVAGVNQVSTTASELNTAMSNLQNGINDEAATKAALNGTQNLEKAKQHANTAIDGLSHLTNAQKEALKQLVQQSTTVAEAQGNEQKANNVDAAMDKLRQSIADNATTKQNQNYTDASQNKKDAYNNAVTTAQGIIDQTTSPTLDPTVINQAAGQVSTTKNALNGNENLEAAKQQASQSLGSLDNLNNAQKQTVTDQINGAHTVDEANQIKQNAQNLNTAMGNLKQAIADKDATKATVNFTDADQAKQQAYNTAVTNAENIISKANGGNATQAEVEQAIKQVNAAKQALNGNANVQHAKDEATALINSSNDLNQAQKDALKQQVQNATTVAGVNNVKQTAQELNNAMTQLKQGIADKEQTKADGNFVNADPDKQNAYNQAVAKAEALISATPDVVVTPSEITAALNKVTQAKNDLNGNTNLATAKQNVQHAIDQLPNLNQAQRDEYSKQII

SEQ ID NO: 13081 - protein, 118 aa, Staphylococcus aureus; identical to SEQ ID NO: 12630

SEQ ID NO: 13082 - protein, 425 aa, Staphylococcus aureus; identical to SEQ ID NO: 12993

SEQ ID NO: 13083 - protein, 1048 aa, Staphylococcus aureus
MAETIINQTTNPTMSVDDVNRATSAVTSNKNALNGYEKLAQSKTDAARAIDALPHLNNAQKADVKSKINAASNIAGVNTVKQQGTDLNTAMGNLQGAINDEQTTLNSQNYQDATPSKKTAYTNAVQAAKDILNKSNGQNKTKDQVTEAMNQVNSAKNNLDGTRLLDQAKQTAKQQLNNMTHLTTAQKTNLTNQINSGTTVAGVQTVQSNANTLDQAMNTLRQSIANKDATKASEDYVDANNDKQTAYNNAVAAAETIINANSNPEMNPSTITQKAEQVNSSKTALNGDENLTAAKQNAKTYLNTLTSITDAQKNNLISQITSATRVSGVDTVKQNAQHLDQAMASLQNGINNESQVKSSEKYRDADTNKQQEYDNAITAAKAILNKSTGPNTAQNAVEAALQRVNNAKDALNGDAKLIAAQNAAKQHLGTLTHITTAQRNDLTNQISQATNLAGVESVKQNANSLDGAMGNLQTAINDKSGTLASQNFLDADEQKRNAYNQAVSAAETILNKQTGPNTAKTAVEQALNNVNNAKHALNGTQNLNNAKQAAITAINGASDLNQKQKDALKAQANGAQRVSNAQDVQHNATELNTAMGTLKHAIADKTNTLASSKYVNADSTKQNAYTTKVTNAEHIISGTPTVVTTPSEVTAAANQVNSAKQELNGDERLREAKQNANTAIDALTQLNTPQKAKLKEQVGQANRLEDVQTVQTNGQALNNAMKGLRDSIANETTVKTSQNYTDASPNNQSTYNSAVSNAKGIINQTNNPTMDTSAITQATTQVNNAKNGLNGAENLRNAQNTAKQNLNTLSHLTNNQKSAISSQIDRAGHVSEVTATKNAATELNTQMGNLEQAIHDQNTVKQSVKFTDADKAKRDAYTNAVSRAEAILNKTQGANTSKQDVEAAIQNVSSAKNALNGDQNVTNAKNAAKNALNNLTSINNAQKRDLTTKIDQATTVAGVEAVSNTSTQLNTAMANLQNGINDKTNTLASENYHDADSDKKTAYTQAVTNAENILNKNSGSNLDKTAVENALSQVANAKGALNGNHNLL

SEQ ID NO: 13084 - protein, 215 aa, Staphylococcus aureus; identical to SEQ ID NO: 12956

SEQ ID NO: 13085 - protein, 265 aa, Staphylococcus aureus; identical to SEQ ID NO: 5906

SEQ ID NO: 13086 - protein, 299 aa, Staphylococcus aureus; identical to SEQ ID NO: 12904

SEQ ID NO: 13087 - protein, 308 aa, Staphylococcus aureus
MVETPYFTKETVDKEKGIIAEEIKMYQEQPGYKLMFNTLRAMYQQHPIRVDIAGSVESIYDITKDDLYLCYETFYHPSNMVLFVVGDVDPEAICRIVKQHEDARNKVNQPKIERGLVDEPEDVKEAFVTESMKIQSPRLMLGFKNKPLQEAPQKYVQRDLEMSLFFELIFGEETDFYQNLLNEGLIDDTFGYQFVLEPTYSFSIVTSATEEPDKLKKLLLDELRDKKGNFQDAEAFELLKKQFIGEFISSLNSLEYIANQYTKLYFEGVSVFDMLDIVENITLDSINETSSLYLNLDQQVDSRLEIKK

SEQ ID NO: 13088 - protein, 299 aa, Staphylococcus aureus; identical to SEQ ID NO: 12958

SEQ ID NO: 13089 - protein, 178 aa, Staphylococcus aureus; identical to SEQ ID NO: 12431

SEQ ID NO: 13090 - protein, 222 aa, Staphylococcus aureus
MKDNLQQISTQINDKSEKNNFSTKPNVIAVTKYVTIERAKEAYEAGIRHFGENRLEGFFQKKEALPSDAVIHFIGSLQSRKVKDVINDVDYFHALDRLSLAKEINKRAEHKIKCFLQVNVSGEASKHGIALEDVDQFIDDLKKYDKIEIVGLMTMAPLTDDEAYIRSLFKQLRLKKEEIQRLNLEYAPCDELSMGMSNDYLIAVEEGATFVRIGTKLVGEEE

SEQ ID NO: 13091 - protein, 187 aa, Staphylococcus aureus; identical to SEQ ID NO: 12178

SEQ ID NO: 13092 - protein, 66 aa, Staphylococcus aureus
MRQSTDLFARGVGDSTDVVQKEMYTFKDKGDRSITLRPEGTAAVARSYIEHKMQGYPNQPIELYYN

SEQ ID NO: 13093 - protein, 627 aa, Staphylococcus aureus
MSQTEEEFNKFAKGAVDKTFNTSQLVRQLNDKSLPLIVTTIQKMAKAIQGNAPLLEQYKTNKVVFIIDECHRSQFGDMHRLVKQHFKNAQYFGFTGTPRFPENSSQDGRTTADIFGRCLHTYLIRDAIHDGNVLGFSVDYINTFKNKALKAEDNSMVEAIDTEEVWLADKRVELVTRHIINNHDKYTRNRQYSSIFTVQSIHALIKYYETFKRLNKKLEQPLTIAGIFTFKPNEDDRDGEVPYHSREKLEIMISDYNKKFETNFSTDTTNEYFNHISKNVKKGVKDSKIDILIVVNMFLTGFDSKVLNTLYVDKNLMYHDLIQAYSRTNRVEKESKPFGKIVNYRDLKKETDDALRVFSQTNDTDTILMRSYEEYKKEFMDAYRELKMIVPTPHMVDDIQDEEELKRFVEAYRLLAKIILRLKAFDEFEFTIDEIGMDEQENEDYKSKYLAVYDQVKRATAEKNKVSILNDIDFEIEMMRNDTINVNYIMNILRQIDLEDKAEQRRNQEQIRRILDHADDPTLRLKRDLIREFIDNVVPSLNKDDDIDQEYVNFESIKKEAEFKGFAGERSIDEQALKTISNDYQYSGVVNPHHLKKMIGDLPLKEKRKARKAIESFVAETTEKYGV

SEQ ID NO: 13094 - protein, 117 aa, Staphylococcus aureus; identical to SEQ ID NO: 12433

SEQ ID NO: 13095 - protein, 79 aa, Staphylococcus aureus; identical to SEQ ID NO: 5861

SEQ ID NO: 13096 - protein, 68 aa, Staphylococcus aureus; identical to SEQ ID NO: 12944

SEQ ID NO: 13097 - protein, 212 aa, Staphylococcus aureus; identical to SEQ ID NO: 12949

SEQ ID NO: 13098 - protein, 110 aa, Staphylococcus aureus; identical to SEQ ID NO: 12422

SEQ ID NO: 13099 - protein, 267 aa, Staphylococcus aureus; identical to SEQ ID NO: 12318

SEQ ID NO: 13100 - protein, 246 aa, Staphylococcus aureus; identical to SEQ ID NO: 5461

SEQ ID NO: 13101 - protein, 77 aa, Staphylococcus aureus; identical to SEQ ID NO: 12802

SEQ ID NO: 13102 - protein, 338 aa, Staphylococcus aureus
MIKQLCKNITICTLALSTTFTVLPATSFAKINSEIKQVSEKNLDGDTKMYTRTATTSDSQKNITQSLQFNFLTEPNYDKETVFIKAKGTIGSGLRILDPNGYWNSTLRWPGSYSVSIQNVDDNNNTNVTDFAPKNQDESREVKYTYGYKTGGDFSINRGGLTGNITKESNYSETISYQQPSYRTLLDQSTSHKGVGWKVEAHLINNMGHDHTRQLTNDSDNRTKSEIFSLTRNGNLWAKDNFTPKDKMPVTVSEGFNPEFLAVMSHDKKDKGKSQFVVHYKRSMDEFKIDWNRHGFWGYWSGENHVDKKEEKLSALYEVDWKTHNVKFVKVLNDNEKK

SEQ ID NO: 13103 - protein, 157 aa, Staphylococcus aureus
MHILVKLLKNVDKVNLSQQNLIEMASLKVPVIAIVIGEGGSGGALGIGIANKVLMLENSTYSVISPEGAAALLWKDSNLAKIAAETMKITAHDIKQLGIIDDVISEPLGGAHKDIEQQALAIKSAFVAQLDSLESLSRDEIANDRFEKFRNIGSYIE

SEQ ID NO: 13104 - protein, 179 aa, Staphylococcus aureus
MLDFEKPLFEIRNKIESLKESQDKNDVDLQEEIDMLEASLERETKKIYTNLKPWDRVQIARLQERPTTLDYIPYIFDSFMELHGDRNFRDDPAMIGGIGFLNGRAVTVIGQQRGKDTKDNIYRNFGMAHPEGYRKALRLMKQAEKFNRPIFTFIDTKGAYPGKAAEERGQSESIATKFD

SEQ ID NO: 13105 - protein, 308 aa, Staphylococcus aureus; identical to SEQ ID NO: 5907

SEQ ID NO: 13106 - protein, 159 aa, Staphylococcus aureus; identical to SEQ ID NO: 5421

SEQ ID NO: 13107 - protein, 313 aa, Staphylococcus aureus; identical to SEQ ID NO: 12342

SEQ ID NO: 13108 - protein, 286 aa, Staphylococcus aureus; identical to SEQ ID NO: 12373

SEQ ID NO: 13109 - protein, 429 aa, Staphylococcus aureus; identical to SEQ ID NO: 12891

SEQ ID NO: 13110 - protein, 84 aa, Staphylococcus aureus; identical to SEQ ID NO: 12377

SEQ ID NO: 13111 - protein, 289 aa, Staphylococcus aureus
MDITGKDQLYFYDAAAPIIEKESIDMDKVYLKSRYDKGEAAYLNCPMTEDEFNRFYDAVLEAEVAPVNSFEKEKYFEGCMPFEVMAERGRKTLLFGPMKPVGLEDPKTGKRPYAVVQLRQDDAAGTLYNIVGFQTHLKWGAQKEVIKLIPGLENVDIVRYGVMHRNTFINSPDVLNEKYELISQPNIQFAGQMTGVEGYVESAASGLVAGINLAHKILGKGEVVFPRETMIGSMAYYISHAKNNKNFQPMNANFGLLPSLETRIKDKKERYEAQANRALDYLENFKKTL

SEQ ID NO: 13112 - protein, 109 aa, Staphylococcus aureus
MTQTVNVIGAGLAGSEAAYQLAERGIKVNLIEMRPVKQTPAHHTDKFAELVCSNSLRGNALTNGVGVLKEEMRRLNSIIIEAADKARVPAGGALAVDRHDFSGYITENT

SEQ ID NO: 13113 - protein, 1269 aa, Staphylococcus aureus
MNLQVAKDNANTAIDQLPNLNQPQKTALKDQVSHAELVTGVNAIKQNADALNNAMGTLKQQIQANSQVPQSVDFTQADQDKQQAYNNAANQAQQIANGIPTPVLTPDTVTQAVTTMNQAKDALNGDEKLAQAKQEALANLDTLRDLNQPQRDALRNQINQAQALATVEQTKQNAQNVNTAMSNLKQGIANKDTVKASENYHDADADKQTAYTNAVSQAEGIINQTTNPTLNPDEITRALTQVTDAKNGLNGEAKLATEKQNAKDAVSGMTHLNDAQKQALKGQIDQSPEIATVNQVKQTATSLDQAMDQLSQAINDKAQTLADGNYLNADPDKQNAYKQAVAKAEALLNKQSGTNEVQAQVESITNEVNAAKQALNGNDNLANAKQQAKQQLANLTHLNDAQKQSFESQITQAPLVTDVTTINQKAQTLDHAMELLRNSVADNQTTLASEDYHDATAQRQNDYNQAVTAANNIINQTTSPTMNPDDVNGATTQVNNTKVALDGDENLAAAKQQANNRLDQLDHLNNAQKQQLQSQITQSSDIAAVNGHKQTAESLNTAMGNLINAIADHQAVEQRGNFINADTDKQTAYNTAVNEAAAMINKQTGQNANQTEVEQAITKVQTTLQALNGDHNLQVAKTNATQAIDALTSLNDPQKTALKDQVTAATLVTAVHQIEQNANTLNQAMHGLRQSIQDNAATKANSKYINEDQPEQQNYDQAVQAANNIINEQTATLDNNAINQAATTVNTTKAALHGDVKLQNDKDHAKQTVSQLAHLNNAQKHMEDTLIDSETTRTAVKQDLTEAQALDQLMDALQQSIADKDATRASSAYVNAEPNKKQSYDEAVQNAESIIAGLNNPTINKGNVSSATQAVISSKNALDGVERLAQDKQTAGNSLNHLDQLTPAQQQALENQINNATTRDKVAEIIAQAQALNEAMKALKESIKDQPQTEASSKFINEDQAQKDAYTQAVQHAKDLINKTTDPTLAKSIIDQATQAVTDAKNNLHGDQKLAQDKQRATETLNNLSNLNTPQRQALENQINNAATRGEVAQKLTEAQALNQAMEALRNSIQDQQQTVAGSKFIHVDKPQKDAYQAAVQNAKDLINQTNNPTLDKAQVEQLTQAVNQAKDNLHGDQKLADDKQHAVTDLNQLNGLNNPQRQALESQINNAATRGEVAQKLAEAKALDQAMQALRNSIQDQQQTESGSKFINEDKPQKDAYQAAVQNAKDLINQTGNPTLDKSQVEQLTQAVTTAKDNLHGDQKLARDQQQA

SEQ ID NO: 13114 - protein, 267 aa, Staphylococcus aureus; identical to SEQ ID NO: 5909

SEQ ID NO: 13115 - protein, 256 aa, Staphylococcus aureus; identical to SEQ ID NO: 5910

SEQ ID NO: 13116 - protein, 255 aa, Staphylococcus aureus; identical to SEQ ID NO: 5848

SEQ ID NO: 13117 - protein, 392 aa, Staphylococcus aureus; identical to SEQ ID NO: 12755

SEQ ID NO: 13118 - protein, 276 aa, Staphylococcus aureus
MTMITPIDKNDDELLNSFERRNRSKVRLALKRGTTVERSDREGLKTFAELMKITGERDGFLTRDISYFENIYDALHEDGDAELFLVKLDPKENIAKVNQELNELHAEIAKWQQKMKTSEKQAKKAQNMINDAQNKIAKNEDLKRDLEALEKEHPEGIYLSGALLMFAGSKSYYLYGASSNEFRDFLPNHHMQYTMMKYAREHGATTYDFGGTDNDPDKDSEHYGLWAFKKVWGTYLSEKIGEFDYVLNQPLYQLIEQVKPRLTKAKIKISRKLKRK

SEQ ID NO: 13119 - protein, 391 aa, Staphylococcus aureus; identical to SEQ ID NO: 12953

SEQ ID NO: 13120 - protein, 178 aa, Staphylococcus aureus; identical to SEQ ID NO: 12133

SEQ ID NO: 13121 - protein, 389 aa, Staphylococcus aureus
MAKEIVRFHSIIWPILLMALDLPLPKKVFAHGWILMKDGKMSKSKGNVVDPNILIDRYGLDATRYYLMRELPFGSDGVFTPEAFVERTNFDLANDLGNLVNRTISMVNKYFDGELPAYQGPLHELDEEMEAMALETVKSYTESMESLQFSVALSTVWKFISRTNKYIDETTPWVLAKDDSQKDMLGNVMAHLVENIRYAAVLLRPFLTHAPKEIFEQLNINNPQFMEFSSLEQYGVLNESIMVTGQPKPIFPRLDSEAEIAYIKESMQPPATKEEKEEIPSKPQIDIKDFDKVEIKAATIIDAEHVKKSDKLLKIQVDLDSEQRQIVSGIAKFYTPDDIIGKKVAVVTNLKPAKLMGQKSEGMILSAEKDGVLTLVSLPSAIPNGAVIK

SEQ ID NO: 13122 - protein, 212 aa, Staphylococcus aureus; identical to SEQ ID NO: 12923

SEQ ID NO: 13123 - protein, 28 aa, Staphylococcus aureus
MKRLENKVAVVTGASTGIGQASAIALAQ

SEQ ID NO: 13124 - protein, 264 aa, Staphylococcus aureus
MTSKHQQKGSIVNRFLNSVEKIGNKLPDPSVLFFLMCVGLAIMTWVISLFNVSVKHPGTHQTIYIKNIISHDGFTMIMNDTIKNFSEFPALGLVLAVMIGIGVAEKTGYFDKLMISVVNRAPRFLILPTIILIGILGSTAGDAATIILPPLAAMLFIKIGYHPIAGLTMAYASAVGGFAANIVVGMQDALVYSFTEPATRIVSDSIKTNVAMNWYFIAASVVVLLPTILLVTTKLIIPRLGKYDDSLMHDDHEETSSHITDKEA

SEQ ID NO: 13125 - protein, 335 aa, Staphylococcus aureus; identical to SEQ ID NO: 12780

SEQ ID NO: 13126 - protein, 193 aa, Staphylococcus aureus
MANMKNSNDRIILFRKAGEKVDATKMLFLTEYGLSHEADTDTEDTMDGSYNTGGSVESTMSGTAKMFYGDDFADEIEDAVVDRVLYEAWEVESRIPGKNGDSAKFKAKYFQGFHNKFELKAEANGIDEYEYEYGVNGRFQRGFATLPEAVTKKLKATGYRFHDTTKADALTGEDLTAIPQPKVDSPPVAPREV

SEQ ID NO: 13127 - protein, 451 aa, Staphylococcus aureus
MKKVLIANRGEIAVRIIRACRDLGIQTVAIYSEGDKDALHTQIADEAYCVGPTLSKDSYLNIPNILSIATSTGCDGVHPGYGFLAENADFAELCEACQLKFIGPSYQSIQKMGIKDVAKAEMIKANVPVVPGSDGLMKDVSEAKKIAKKIGYPVIIKATAGGGGKGIRVARDEKELETGFRMTEQEAQTAFGNGGLYMEKFIENFRHIEIQIVGDSYGNVIHLGERDCTIQRRMQKLVEEAPSPILDDETRREMGNAAVRAAKAVNYENAGTIEFIYDLNDNKFYFMEMNTRIQVEHPVTEMVTGIDLVKLQLQVAMGDVLPYKQEDIKLTGHAIEFRINAENPYKNFMPSPGKIEQYLAPGGYGVRIESACYTNYTIPPYYDSMVAKLIIHEPTRDEAIMAGIRALSEFVVLGIDTTIPFHIKLLNNDIFRSGKFNTNFLEQNSIMNDEG

SEQ ID NO: 13128 - protein, 434 aa, Staphylococcus aureus
MPIITDVYAREVLDSRGNPTVEVEVLTESGAFGRALVPSGASTGEHEAVELRDGDKSRYLGKGVTKAVENVNEIIAPEIIEGEFSVLDQVSIDKMMIALDGTPNKGKLGANAILGVSIAVARAAADLLGQPLYKYLGGFNGKQLPVPMMNIVNGGSHSDAPISFQEFMILPVGATTFKESLRWGTEIFHNLKSILSKRGLETAVGDEGGFAPKFEGTEDAVETIIQAIEAAGYKPGEEVFLGFDCASSEFYENGVYDYSKFEGEHGAKRTAAEQVDYLEQLVDKYPIITIEDGMDENDWDGWKQLTERIGDRVQLVGDDLFVTNTEILAKGIENGIGNSILIKVNQIGTLTETFDAIEMAQKAGYTAVVSHRSGETEDTTIADIAVATNAGQIKTGSLSRTDRIAKYNQLLRIEDELFETAKYDGIKSFYNLDK

SEQ ID NO: 13129 - protein, 422 aa, Staphylococcus aureus; identical to SEQ ID NO: 12560

SEQ ID NO: 13130 - protein, 104 aa, Staphylococcus aureus; identical to SEQ ID NO: 3804

SEQ ID NO: 13131 - protein, 311 aa, Staphylococcus aureus; identical to SEQ ID NO: 12344

SEQ ID NO: 13132 - protein, 302 aa, Staphylococcus aureus; identical to SEQ ID NO: 12878

SEQ ID NO: 13133 - protein, 135 aa, Staphylococcus aureus
MTPLTVEKVGEGQPSEGFTNQPVYKIVEFGAQEPKDPKGPENPEKPSRPTHPIGPVNPNNPGLSKVRAKPNGPVHSMDKNDKVKKSKIAKESVANQEKKRAELPKTGLESTQKGLIFSSIIGIAGLMLLARRRKN

SEQ ID NO: 13134 - protein, 242 aa, Staphylococcus aureus; identical to SEQ ID NO: 5439

SEQ ID NO: 13135 - protein, 173 aa, Staphylococcus aureus; identical to SEQ ID NO: 12386

SEQ ID NO: 13136 - protein, 800 aa, Staphylococcus aureus
MSEIIQDLSLEDVLGDRFGRYSKYIIQERALPDVRDGLKPVQRRILYAMYSSGNTHDKNFRKSAKTVGDVIGQYHPHGDSSVYEAMVRLSQDWKLRHVLIEMHGNNGSIDNDPPAAMRYTEAKLSLLAEELLRDINKETVSFIPNYDDTTLEPMVLPSRFPNLLVNGSTGISAGYATDIPPHNLAEVIQATLKYIDNPDITVNQLMKYIKGPDFPTGGIIQGIDGIKKAYESGKGRIIVRSKVEEETLRNGRKQLIITEIPYEVNKSSLVKRIDELRADKKVDGIVEVRDETDRTGLRIAIELKKDVNSESIKNYLYKNSDLQISYNFNMVAISDGRPKLMGIRQIIDSYLNHQIEVVANRTKFELDNAEKRMHIVEGLIKALSILDKVIELIRSSKNKRDAKENLIEVYEFTEEQAEAIVMLQLYRLTNTDIVALEGEHKELEALIKQLRHILDNHDALLNVIKEELNEIKKKFKSERLSLIEAEIEEIKIDKEVMVPSEEVILSMTRHGYIKRTSIRSFNASGVEDIGLKDGDSLLKHQEVNTQDTVLVFTNKGRYLFIPVHKLADIRWKELGQHVSQIVPIEEDEVVINVFNEKDFNTDAFYVFATQNGMIKKSTVPLFKTTRFNKPLIATKVKENDDLISVMRFEKDQLITVITNKGMSLTYNTSELSDTGLRAAGVKSINLKAEDFVVMTEGVSENDTILMATQRGSLKRISFKILQVAKRAQRGITLLKELKKNPHRIVAAHVVTGEHSQYTLYSKSNEEHGLINDIHKSEQYTNGSFIVDTDDFGEVIDMYIS

SEQ ID NO: 13137 - protein, 1349 aa, Staphylococcus aureus; identical to SEQ ID NO: 5898

SEQ ID NO: 13138 - protein, 340 aa, Staphylococcus aureus; identical to SEQ ID NO: 12425

SEQ ID NO: 13139 - protein, 188 aa, Staphylococcus aureus; identical to SEQ ID NO: 12426

SEQ ID NO: 13140 - protein, 767 aa, Staphylococcus aureus
MKSNLRYGIRKHKLGAASVFLGTMIVVGMGQEKEAAASEQNNTTVEESGSSATESKASETQTTTNNVNTIDETQSYSATSTEQPSQSTQVTTEEAPKTVQAPKVETSRVDLPSEKVADKETTGTQVDIAQPSNVSEIKPRMKRSTDVTAVAEKEVVEETKATGTDVTNKVEVEEGSEIVGHKQDTNVVNPHNAERVTLKYKWKFGEGIKAGDYFDFTLSDNVETHGISTLRKVPEIKSTDGQVMATGEIIGERKVRYTFKEYVQEKKDLTAELSLNLFIDPTTVTQKGNQNVEVKLGETTVSKIFNIQYLGGVRDNWGVTANGRIDTLNKVDGKFSHFAYMKPNNQSLSSVTVTGQVTKGNKPGVNNPTVKVYKHIGSDDLAESVYAKLDDVSKFEDVTDNMSLDFDTNGGYSLNFNNLDQSKNYVIKYEGYYDSNASNLEFQTHLFGYYNYYYTSNLTWKNGVAFYSNNAQGDGKDKLKEPIIEHSTPIELEFKSEPPVEKHELTGTIEESNDSKPIDFEYHTAVEGAEGHAEGTIETEEDSIHVDFEESTHENSKHHADVVEYEEDTNPGGGQVTTESNLVEFDEDSTKGIVTGAVSDHTTIEDTKEYTTESNLIELVDELPEEHGQAQGPIEEITENNHHISHSGLGTENGHGNYGVIEEIEENSHVDIKSELGYEGGQNSGNQSFEEDTEEDKPKYEQGGNIVDIDFDSVPQIHGQNNGNQSFEEDTEKDKPKYEQGGNIIDIDFDSVPHIHGFNKHTEIIKK

SEQ ID NO: 13141 - protein, 157 aa, Staphylococcus aureus; identical to SEQ ID NO: 5855

SEQ ID NO: 13142 - protein, 189 aa, Staphylococcus aureus; identical to SEQ ID NO: 5318

SEQ ID NO: 13143 - protein, 271 aa, Staphylococcus aureus; identical to SEQ ID NO: 12298

SEQ ID NO: 13144 - protein, 265 aa, Staphylococcus aureus; identical to SEQ ID NO: 12870

SEQ ID NO: 13145 - protein, 188 aa, Staphylococcus aureus; identical to SEQ ID NO: 12299

SEQ ID NO: 13146 - protein, 331 aa, Staphylococcus aureus; identical to SEQ ID NO: 5912

SEQ ID NO: 13147 - protein, 88 aa, Staphylococcus aureus; identical to SEQ ID NO: 5525

SEQ ID NO: 13148 - protein, 920 aa, Staphylococcus aureus; identical to SEQ ID NO: 12995

SEQ ID NO: 13149 - protein, 119 aa, Staphylococcus aureus; identical to SEQ ID NO: 12982

SEQ ID NO: 13150 - protein, 343 aa, Staphylococcus aureus; identical to SEQ ID NO: 12981

SEQ ID NO: 13151 - protein, 132 aa, Staphylococcus aureus; identical to SEQ ID NO: 5399

SEQ ID NO: 13152 - protein, 263 aa, Staphylococcus aureus; identical to SEQ ID NO: 13018

SEQ ID NO: 13153 - protein, 304 aa, Staphylococcus aureus; identical to SEQ ID NO: 13017

SEQ ID NO: 13154 - protein, 147 aa, Staphylococcus aureus; identical to SEQ ID NO: 12398

SEQ ID NO: 13155 - protein, 132 aa, Staphylococcus aureus; identical to SEQ ID NO: 5913

SEQ ID NO: 13156 - protein, 226 aa, Staphylococcus aureus; identical to SEQ ID NO: 5900

SEQ ID NO: 13157 - protein, 327 aa, Staphylococcus aureus; identical to SEQ ID NO: 5901

SEQ ID NO: 13158 - protein, 1002 aa, Staphylococcus aureus; identical to SEQ ID NO: 12899

SEQ ID NO: 13159 - protein, 185 aa, Staphylococcus aureus; identical to SEQ ID NO: 5507

SEQ ID NO: 13160 - protein, 91 aa, Staphylococcus aureus; identical to SEQ ID NO: 5914

SEQ ID NO: 13161 - protein, 84 aa, Staphylococcus aureus; identical to SEQ ID NO: 5915

SEQ ID NO: 13162 - protein, 490 aa, Staphylococcus aureus
MNQDQEKVLPTASILGLIPDYPDHTLTGEIIFNGQSLNNLSTSALQQIRGKDISMIFQDPLSSLNPRLTIGKQITEVIFQHKRVSKSEAKSMTIDILEKVGIKHATRQFDAYPHELSGGMRQRVMIAMALILKPQILIADEPTTALDASTQNQLLQLMKSLYEYTETSIIFITHDLGAVYQFCDDVIVMKDGSVVESGTVESIFKSPQHTYTKRLIDAIPDIHQTRPPRPLNNDILLKFDRVSVDYTSPSGSLYRAVNDINLAIRKGETLGIVGESGSGKSTLAKTVVGLKEVSEGFIWYNELPLSLFKDDELKSLRQEIQMIFQDPFASINPRFKVIDVIKRPLIIHGKVKDNDDIIKTVVSLLEKVGLDQTFLYRYPHELSGGQRQRVSIARALAVEPKVIVCDEAVSALDVSIQKDIIELLKQLQLDFGITYLFITHDMGVINEICDRVAVMKNGEIVELNNTEDIIKHPQSDYAKQLISEVAVIAK

SEQ ID NO: 13163 - protein, 105 aa, Staphylococcus aureus; identical to SEQ ID NO: 5465

SEQ ID NO: 13164 - protein, 198 aa, Staphylococcus aureus; identical to SEQ ID NO: 5466

SEQ ID NO: 13165 - protein, 196 aa, Streptococcus pneumoniae
MSKMYYAENPDAAHDIHELRVELLGQKMTFLTDAGVFSKKIVDFGSQLLLKCLEVNQGETVLDVGCGYGPLGLSLAKAYGVQATMVDINTRALDLARRNAEKNNAKATIFQSNIYEQVEGHFDHVISNPPIRAGKQVVHEIIEKSKDFLETSGDLTIVIQKKQGAPSAKSKMEDVFGNCEILKKDKGYYILRSVKE

SEQ ID NO: 13166 - protein, 425 aa, Streptococcus pneumoniae
MRAVDLIQKKRDGQELTSSEIEWLVEGYVSGTVPDYQMSAFAMAVYFKGMTTREISDLTMNMVKTGQEFDLSAIDGVKVTKHSTGGVGDKVTLILVPLVASFGVPVAKMSGRGLGHTGGTIDKLESIKGYQVERSQEDFIRQVQDIGVSVIGQSDQLVKADKLLYALRDVTATVDTIPLIASSVMSKKIAAGADAILLDVTVGEGAFMKTVDEARELAQTMVDLGKVVGRKTVAVITDMSQPLGRAIGNRLEILEALEILQGQGRQDITHFICELAQIMLGLANVNKTVEEVRQHLENGQALAKFEEMVQAQGGDLEDLYRPVNVAHVVEIPAQETGVISALPAMDFGLYAMRLGAGRAVKSDALDYETGIVFEKKIEDSVQKGEIVAKVYTNEKIPPQLVTDFQKCVKISDEVKKIREIVEIIS

SEQ ID NO: 13167 - protein, 511 aa, Streptococcus pneumoniae
MAHENVIEMRDITKVFGGFVANDKINLHLRKGEIHALLGENGAGKSTLMNMLAGLLEPTSGEIAVNGQVVNLDSPSKAASLGIGMVHQHFMLVEAFTVAENIILGSELTKNGVLDIAGASKEIKALSERYGLAVDPSAKVADISVGAQQRVEILKTLYRGADILIFDEPTAVLTPSEIDELMAIMKNLVKEGKSIILITHKLDEIRAVSDRVTVIRRGKSIETVEIAGATNADLAEMMVGRSVSFKTEKQASKPKEVVLSIKDLVVNENRGVPAVKNLSLDVRAGEIVGIAGIDGNGQSELIQAITGLRKVESGSIELKGDSIVGLHPRQITELSVGHVPEDRHRDGLILEMMISENIALQTYYKEPHSKNGILNYSNITSYAKKLMEEFDVRAASELVPAAALSGGNQQKAIIAREIDRDPDLLIVSQPTRGLDVGAIEYIHKRLIEERDNGKAVLVVSFELDEILNVSDRIAVIHDGKIQGIVSPETTNKQGLGVLMAGGNLGKEKSDV

SEQ ID NO: 13168 - protein, 183 aa, Streptococcus pneumoniae
MKGNIMDSFDKGWFVLQTYSGYENKVKENLLQRAQTYNMLDNILRVEIPTQTVQVEKNGKRKEVEENRFPGYVLVEMVMTDEAWFVVRNTPNVTGFVGSHGNRSKPTPLLEQEIRDILVSMGQTVQEFDFDVEIGQTVRIIDGAFADYTGKITEIDNNKVKMIISMFGNDTVAEVNLNQIAEL

SEQ ID NO: 13169 - protein, 359 aa, Streptococcus pneumoniae
MICSDSSYSFHNKNFMIFIRRKSLMVVKVGINGFGRIGRLAFRRIQNVEGVEVTRINDLTDPVMLAHLLKYDTTQGRFDGTVEVKEGGFEVNGKFIKVSAERDPEQIDWATDGVEIVLEATGFFAKKEAAEKHLKGGAKKVVITAPGGNDVKTVVFNTNHDVLDGTETVISGASCTTNCLAPMAKALQDNFGVVEGLMTTIHAYTGDQMILDGPHRGGDLRRARAGAANIVPNSTGAAKAIGLVIPELNGKLDGSAQRVPTPTGSVTELVAVLEKNVTVDEVNAAMKAASNESYGYTEDPIVSSDIVGMSYGSLFDATQTKVLDVDGKQLVKVVSWYDNEMSYTAQLVRTLEYFAKIAK

SEQ ID NO: 13170 - protein, 572 aa, Streptococcus pneumoniae
MSYQENYQKWVDFVELPDYLRQDLENMDEKTKEDAFYTNLEFGTAGMRGLVGAGTNRINIYVVRQATEGLARLIESKGGNEKERGVAIAYDSRHFSPEFAFESAAVLAKHGIKSYVFESLRPTPELSFAVRHLNCFAGIMVTASHNPAPFNGYKVYGEDGGQMPPHDADALTTYIRAIENPFAVEVADVETEKASGLIEVIGEAVDIEYLKEVKDININPALIEEFGKDMKIVYTPLHGTGEMLARRALAQAGFDSVQVVEAQATADPDFSTVTSPNPESQAAFALAEELGRQVGADVLVATDPDADRVGVEVLQKDGSYLNLSGNQIGAIMAKYILEAHKNAGTLPENAALCKSIVSTDLVTKIAESYGATMFNVLTGFKFIAEKIQEFEEKHNHTYMMGFEESFGYLIKPFVRDKDAIQAVLVVAELAAYYRSRGLTLADGIEEIYKEYGYYAEKTISVTLSGVDGAEQIKAIMAKFRNNAPTEWNATAITVVEDFKAQTATVADGTVTNLTTPPSDVLKYTLADGSWIAVRPSGTEPKIKFYIAVVGETNEESQAKIANIEAEINAFVK

SEQ ID NO: 13171 - protein, 398 aa, Streptococcus pneumoniae
MAKEKYDRSKPHVNIGTIGHVDHGKTTLTAAITTVLARRLPSSVNQPKDYASIDAAPEERERGITINTAHVEYETEKRHYAHIDAPGHADYVKNMITGAAQMDGAILVVASTDGPMPQTREHILLSRQVGVKHLIVFMNKVDLVDDEELLELVEMEIRDLLSEYDFPGDDLPVIQGSALKALEGDSKYEDIVMELMNTVDEYIPEPERDTDKPLLLPVEDVFSITGRGTVASGRIDRGIVKVNDEIEIVGIKEETQKAVVTGVEMFRKQLDEGLAGDNVGVLLRGVQRDEIERGQVIAKPGSINPHTKFKGEVYILTKEEGGRHTPFFNNYRPQFYFRTTDVTGSIELPAGTEMVMPGDNVTIDVELIHPIAVEQGTTFSIREGGRTVGSGMVTEIEA

SEQ ID NO: 13172 - protein, 336 aa, Streptococcus pneumoniae
MKDRYILAFETSCDETSVAVLKNDDELLSNVIASQIESHKRFGGVVPEVASRHHVEVITACIEEALAEAGITEEDVTAVAVTYGPGLVGALLVGLSAAKAFAWAHGLPLIPVNHMAGHLMAAQSVEPLEFPLLALLVSGGHTELVYVSEAGDYKIVGETRDDAVGEAYDKVGRVMGLTYPAGREIDELAHQGQDIYDFPRAMIKEDNLEFSFSGLKSAFINLHHNAEQKGESLSTEDLCASFQAAVMDILMAKTKKALEKYPVKTLVVAGGVAANKGLRERLATEITDVNVIIPPLRLCGDNAGMIAYASVSEWNKENFANLDLNAKPSLAFDTME

SEQ ID NO: 13173 - protein, 284 aa, Streptococcus pneumoniae
MKIKKWLGLAALATVAGLALAACGNSEKKADNATTIKIATVNRSGSEEKRWDKIQELVKKDGITLEFTEFTDYSQPNKATADGEVDLNAFQHYNFLNNWNKENGKDLVAIGDTYISPIRLYSGLNGSANKYTKVEDIPANGEIAVPNDATNESRALYLLQSAGLIKLDVSGTALATVANIKENPKNLKITELDASQTARSLSSVDAAVVNNTFVTEAKLDYKKALFKEQADENSKQWYNIIVAKKDWETSPKADAIKKVIAAYHTDDVKKVIEESSDGLDQPVW

SEQ ID NO: 13174 - protein, 230 aa, Streptococcus pneumoniae
MESLIQTYLPNVYKMGWAGQAGWGTAIYLTLYMTVLSFIIGGFLGLVAGLFLVLTAPGGVLENKVVFWILDKITSIFRAVPFIILLAILSPLSHLIVKTSIGPNAALVPLSFAVFAFFARQVQVVLAELDGGVIEAAQASGATFWDIVGVYLSEGLPDLIRVTTVTLISLVGETAMAGAVGAGGIGNVAIAYGFNRYNHDVTILATIVIILIIFAIQFLGDFLTKKLSHK

SEQ ID NO: 13175 - protein, 391 aa, Streptococcus pneumoniae
MKHTRPSIVNKRIDGRLTMSDNSKTRVVVGMSGGVDSSVTALLLKEQGYDVIGIFMKNWDDTDENGVCTATEDYKDVVAVADQIGIPYYSVNFEKEYWDRVFEYFLAEYRAGRTPNPDVMCNKEIKFKAFLDYAMTLGADYVATGHYARVARDEDGTVHMLRGVDNGKDQTYFLSQLSQEQLQKTMFPLGHLKKPEVRKLAEEAGLSTAKKKDSTGICFIGEKNFKNFLSNYLPAQPGRMMTVDGRDMGEHAGLMYYTIGQRGGLGIGGQHGGDNAPWFVVGKDLSKNILYVGQGFYHDSLMSTSLEASQVHFTREMPEEFTLECTAKFRYRQPDSKVTVHVKGDKAEVIFAEPQRAITPGQAVVFYDGEECLGGGLIDNAYRDGQVCQYI

SEQ ID NO: 13176 - protein, 610 aa, Streptococcus pneumoniae
MPAQNLRAVSLLANLSKKIAQSTISSISNSCLTNCSITKKKLAPSKLRSSNMAYTLKPEEVGVFAIGGLGEIGKNTYGIEYQDEIIIVDAGIKFPEDDLLGIDYVIPDYSYIVDNIDRVKAVLITHGHEDHIGGIPFLLKQANVPIYAGPLALALIRGKLEEHGLLRNAKLYEINHNTELTFKNLKATFFRTTHSIPEPLGIVIHTPQGKIVCTGDFKFDFTPVGEPADLHRMAALGEEGVLCLLSDSTNAEVPTFTNSEKVVGQSIMKIIQGIEGRIIFASFASNIFRLQQATEAAVKTGRKIAVFGRSMEKAIVNGIDLGYIKAPKGTFIEPNEIKDYPAGEVLILCTGSQGEPMAALSRIANGTHRQVQLQPGDTVIFSSSPIPGNTTSVNKLINIISEAGVEVIHGKVNNIHTSGHGGQQEQKLMLRLIKPKYFMPVHGEYRMQKVHAGLAVDTGVEKDNIFIMSNGDVLALTADSARIAGHFNAQDIYVDGNRIGEIGAAVLKDRRDLSEDGVVLAVATVDFKSQMILSGPDILSRGFVYMRESGDLIRQSQRILFNAIRIALKNKDASVQSVNGAIVNAIRPFLYENTEREPIIIPMILTPDEE

SEQ ID NO: 13177 - protein, 380 aa, Streptococcus pneumoniae
MSDSPIKYRLIKKEKHTGARLGEIITPHGTFPTPMFMPVGTQATVKTQSPEELKEMGSGIILSNTYHLWLRPGDELIARAGGLHKFMNWDQPILTDSGGFQVYSLADSRNITEEGVTFKNHLNGSKMFLSPEKAISIQNNLGSDIMMSFDECPQFYQPYDYVKKSIERTSRWAERGLKAHRRPHDQGLFGIVQGAGFEDLRRQSAHDLVSMDFSGYSIGGLAVGETHEEMNAVLDFTTQLLPENKPRYLMGVGAQDSLIDGIIRGVDMFDCVLPTRIARNGTCMTSQGRLVVKNAQFAEDFTPLDPECDCYTCNNYTRAYLRHLLKADETFGIRLTSYHNLYFLLNLMKQVRQAIMDDNLLEFREYFVEKYGYNKSGRNF

SEQ ID NO: 13178 - protein, 383 aa, Streptococcus pneumoniae
MPNYIKADQFFYPHGVRRGGYLELVDGKFGKHVEQIPEGAEVIDYTGYSIAPGLVDTHIHGYAGVDVMDNNIEGTLHTMSEGLLRTGVTSFLPTTLTATYEQLLAVTENLGNHYKEATGAKIRGIYYEGPYFTETFKGAQNPTYMRDPGVEEFHSWQKAANGLLNKIALAPERDGVEDFVRTVTGEGVTVALGHSNATFDEAKKAVDAGASVWVHAYNGMRGLTHRELGMVGAMYQLPHTYAELICDGHHVDPKACEILIKQKGTENIALITDCMTAGGLEDGDYMLGEFPVVVANGTARLKSTGNLAGSILKLKDGLKNVVEWEIGNPHEAVMMASFNPAKSVHIDDVCGQIREGYDADFIVLDKDLELVATYLDGVKRYQA

SEQ ID NO: 13179 - protein, 887 aa, Streptococcus pneumoniae
MEENMADKKTVTPEEKKLVAEKHVDELVQKALVALEEMRKLNQEQVDYIVAKASVAALDAHGELALHAFEETGRGVFEDKATKNLFACEHVVNNMRHTKTVGVIEEDDVTGLTLIAEPVGVVCGITPTTNPTSTAIFKSLISLKTRNPIVFAFHPSAQESSAHAARIVRDAAIAAGAPENCVQWITQPSMEATSALMNHEGVATILATGGNAMVKAAYSCGKPALGVGAGNVPAYVEKSANIRQAAHDIVMSKSFDNGMVCASEQAVIIDKEIYDEFVAEFKSYHTYFVNKKEKALLEEFCFGVKANSKNCAGAKLNADIVGKPATWIAEQAGFTVPEGTNILAAECKEVGENEPLTREKLSPVIAVLKSESREDGITKARQMVEFNGLGHSAAIHTADEELTKEFGKAVKAIRVICNSPSTFGGIGDVYNAFLPSLTLGCGSYGRNSVGDNVSAINLLNIKKVGRRRNNMQWMKLPSKTYFERDSIQYLQKCRDVERVMIVTDHAMVELGFLDRIIEQLDLRRNKVVYQIFADVEPDPDITTVNRGTEIMRAFKPDTIIALGGGSPMDAAKVMWLFYEQPEVDFRDLVQKFMDIRKRAFKFPLLGKKTKFIAIPTTSGTGSEVTPFAVISDKANNRKYPIADYSLTPTVAIVDPALVLTVPGFVAADTGMDVLTHATEAYVSQMASDYTDGLALQAIKLVFENLESSVKNADFHSREKMHNASTIAGMAFANAFLGISHSMAHKIGAQFHTIHGRTNAILLPYVIRYNGTRPAKTATWPKYNYYRADEKYQDIARMLGLPASTPEEGVESYAKAVYELGERIGIQMNFRDQGIDEKEWKEHSRELAFLAYEDQCSPANPRLPMVDHMQEIIEDAYYGYKERPGRRK

SEQ ID NO: 13180 - protein, 431 aa, Streptococcus pneumoniae
MKNSKFIDQFATFAGKLGNQIHLKTLRDAFVTVMPLYILAGLIVLLNNTVFKWIFQGDTLTRFQYWGITIANGTLSISGMIIAVMVGYFLAKNRDFENPLAASMLSLVSLIVMMPNTVSVVPDGAKDAVNISGVLSFNNTGTGAMFAGVIVAIIATELFIELSNVKALQMNLGENIPPAVSRSFSVLLPVMTVISLFGVVSALLFNITGMNLISIITIFIQEPIRHIGTSLIGVIIIYSLGNMLWLFGIHQAVIYSAILEPLLLINITENITAANNGQAIPHIINLSQIQTFALMGGSGSTLCLLIATFLVSRNAVSKNVAKLSFGPGIFNINEPVLFGYPIVYNISLAIPFITVPVLGILISYLATVTGFMSPAFIQVPWTTPVFLNAWLATAGDVRAVLVQFIIFALGVLLYIPFIKVNDKVVEQEMEG

SEQ ID NO: 13181 - protein, 44 aa, Streptococcus pneumoniae
MKRTYQPSKLRRARKHGFRNRMSTKNGRRVLAARRRKGRKVLAA

SEQ ID NO: 13182 - protein, 290 aa, Streptococcus pneumoniae
MRIADYSVTKAVLERHGFTFKKSFGQNFLTDTNILQKIVDTAEIDDQVNVIEIGPGIGALTEFLAERAAQVMAFEIDHRLVPILADTLRDFDNVTVVNEDILKVDLAQHIQNFKNPNLPIKVVANLPYYITTPILMHLIESGIPFSEFVVMMQKEVADRISAQPNTKAYGSLSIAVQYYMTAKVAFIVPRTVFVPAPNVDSAILKMVRRPEPAVAVEDENFFFKVSKASFTHRRKTLWNNLTGYFGKTEEVKDKLTKALDQAGLSPSVRGEALSLAEFAGLADALKGQGL

SEQ ID NO: 13183 - protein, 317 aa, Streptococcus pneumoniae
MRKNMKISHMKKDELFEGFYLIKSADLRQTRAGKNYLAFTFQDDSGEIDGKLWDAQPHNIEAFTAGKVVHMKGRREVYNNTPQVNQITLRLPQAGEPNDPADFKVKSPVDVKEIRDYMSQMIFKIENPVWQRIVRNLYTKYDKEFYSYPAAKTNHHAFETGLAYHTATMVRLADAISEVYPQLNKSLLYAGIMLHDLAKVIELTGPDQTEYTVRGNLLGHIALIDSEITKTVMELGIDDTKEEVVLLRHVILSHHGLLEYGSPVRPRIMEAEIIHMIDNLDASMMMMSTALALVDKGEMSNKIFAMDNRSFYKPDLD

SEQ ID NO: 13184 - protein, 246 aa, Streptococcus pneumoniae
MTIITSKANSVVKNAKKLHQKKYRKSAYLIEGWHLFEEAVQAGVTIEKIFALENYRDQLAAFPQTVWISEDILLDLADSQTPQGIVAVVQKEEVGQADLSQGKFLFLEDVQDPGNVGTIIRTADAVGFTGVIVSDKSADIYSLKTLRSMQGSHFHLPIYRMTSPALLDETKKVAIPVLATTLSKDSVDYRELPSIENFVLVMGNEGQGISPLMAESADQLVHISMKGQAESLNVAVAAGILIFHLS

SEQ ID NO: 13185 - protein, 365 aa, Streptococcus pneumoniae
MLERLKSIHYMFWISLIFMVFPILTVVTGWLSAWHLLIDILFVVAYLGVLTTKSQRLSWLYWGILLTYVVGNTAFVAVNYIWFFFFLSNLLSYHFSVGGLKSLHVWTFLLAQVLVVGQLLIFQRIEVEFLFYLLVILAFVDLMTFGLVRIRIVEDLKEAQAKQNAQINLLLAENERNRIGQDLHDSLGHTFAMLSVKTDLALQLFQMEAYPQVEKELKEIHQISKDSMNEVRTIVENLKSRTLTSELETVKKMLEIAGIEVETDNQLDTASLTQELESMASMILLELVTNIIKHAKASKAYLKLERTEKELILTVSDDGCGFAFLKGDELHTVRDRVFPFSGEVSVISQKHPTEVQVRLPYKERN

SEQ ID NO: 13186 - protein, 436 aa, Streptococcus pneumoniae
MKSRVKETSMDKIVVQGGDNRLVGSVTIEGAKNAVLPLLAATILASEGKTVLQNVPILSDVFIMNQVVGGLNAKVDFDEEAHLVKVDATGDITEEAPYKYVSKMRASIVVLGPILARVGHAKVSMPGGCTIGSRPIDLHLKGLEAMGVKISQTAGYIEAKAERLHGAHIYMDFPSVGATQNLMMAATLADGVTVIENAAREPEIVDLAILLNEMGAKVKGAGTETITITGVEKLHGTTHNVVQDRIEAGTFMVAAAMTGGDVLIRDAVWEHNRPLIAKLLEMGVEVIEEDEGIRVRSQLENLKAVHVKTLPHPGFPTDMQAQFTALMTVAKGESTMVETVFENRFQHLEEMRRMGLHSEIIRDTARIVGGQPLQGAEVLSTDLRASAALILTGLVAQGETVVGKLVHLDRGYYGFHEKLAQLGAKIQRIEANDEDE

SEQ ID NO: 13187 - protein, 1156 aa, Streptococcus pneumoniae
MFEDVLPISNFTDTMELEFVGYEIKEPKYTLEEARIHDASYSAPIFVTFRLINKETGEIKTQEVFFGDFPIMTEMGTFIINGGERIIVSQLVRSPGVYFNDKVDKNGKVGYGSTVIPNRGAWLELESDSKDITYTRIDRTRKIPFTTLVRALGFSGDDEIFDIFGDSELVRNTVEKDIHKNPMDSRTDEALKEIYERLRPGEPKTAESSRSLLVARFFDPRRYDLAAVGRYKINKKLNVKTRLLNQTIAEPLVDPETGEILVEAGTIMTRSVIESIESHLDGDLNKIVYIPNDAAVVTEPVVLQKFKVVAPTDPDRVVTIIGNANPDDKVRTVTPADILAEMSYFLNLAEGLGRVDDIDHLGNRRIRAVGELLANQVRLGLSRMERNVRERMSVQDNEVLTPQQIINIRPVTAAVKEFFGSSQLSQFMDQHNPLSELSHKRRLSALGPGGLTRDRAGYEVRDVHYTHYGRMCPIETPEGPNIGLINNLSSYGHLNKYGFVQTPYRKVDRETGVVTNEIVWLTADEEDEYTVAQANSRLNEDGTFAEKIVMGRHQGVNQEYPANIVDYMDVSPKQVVAVATACIPFLENDDSNRALMGANMQRQAVPLINPQAPYVGTGMEYQAAHDSGAAVIAQYDGKVTYADADKVEVRREDGSLDVYHIQKFRRSNSGTAYNQRTLVKVGDVVEKGDFIADGPSMENGEMALGQNPIVAYMTWEGYNFEDAVIMSERLVKDDVYTSVHLEEYESETRDTKLGPEEITREIPNVGEDALKDLDEMGIIRIGAEVKEGDILVGKVTPKGEKDLSAEERLLHAIFGDKSREVRDTSLRVPHGADGVVRDVKIFTRVNGDELQSGVNMLVRVYIAQKRKIKVGDKMAGRHGNKGVVSRIVPVEDMPYLPDGTPVDIMLNPLGVPSRMNIGQVMELHLGMAARTLGIHIATPVFDGASSEDLWSTVKEAGMDSDAKTILYDGRTGEPFDNRVSVGVMYMIKLHHMVDDKLHARSVGPYSTVTQQPLGGKAQFGGQRFGEMEVWALEAYGASNVLQEILTYKSDDINGRLKAYEAITKGKPIPKPGVPESFRVLVKELQSLGLDMRVLDEDDQEVELRDLDEGMDEDVIHVDDLEKAREKAAQEAKAAFEAEEAEKATKAEATEEAAEQE

SEQ ID NO: 13188 - protein, 338 aa, Streptococcus pneumoniae
MVKKIIGMVLALLSVTVVGVGVFAYTIYQQGTETLAKTYKKIGEETKVIEATEPLTILLMGVDTGNVERTETWVGRSDSMILMTVNPKTKKTTMMSLERDILTRIESGNGQAHEAKLNSAYADGGAELAIETIQKMMNIHIDRYVMVNMRGLQKLVDAVGGITVNNILGFPISISDQEEFNTISIGVGEQHIGGEEALVYARMRYQDPEGDYGRQKRQREVIQKVMEKALSLNSIGHYQEILKALSDNMQTNIDLSAKSIPNLLGYKDSFKTIETQQLQGEGEILQGVSYQIVSRAHMLEMQNILRRSLGQEEVTQLETNAVLFEDLFGRAPVGDEDN

SEQ ID NO: 13189 - protein, 208 aa, Streptococcus pneumoniae
MIFTYNKEHVGDVLMVIVKNSGDAKLNVERKGKVARVFLKENGETVAWNIFEVSSLFEIAERGQVFLSDEQVARLNQELQAEGFTEEIVNDKEPKFVVGEIVEMVAHPDSDHLNICQVAVASDKIVQIVAGAPNARVGLKTIVALPGAMMPKGNFIFPGELRGEKSFGMMCSPRELHLPNAPQKRGVLELSEDQVVGTPFDPAKHWTA

SEQ ID NO: 13190 - protein, 94 aa, Streptococcus pneumoniae
MLKPLGDRVLLKIEEKEQTVGGFVLAGSAQEKTKTAQVVATGQGVRTLNGDLVAPSVKTGDRVLVEAHAGLDVKDGDEKYIIVGEANILAIIEE

SEQ ID NO: 13191 - protein, 240 aa, Streptococcus pneumoniae
MRLDKFLVACAVGSRTEVKNLLKAGRVTVNGKKEKSAKFQIDEKIDEIRFDGQVLEYEEFVYYMMNKPKGVISATEDPKHRTVLDLLDDLARSKEVFPVGRLDINTHGLLLLTNDGQLAHVLLSPKRHVDKTYLAQVKGIMTQEDVETFAEGIPLKDFTCQPARLEILSTDAEKNQSQIRVTIAEGKFHQIKRMVGYCGKEVVDLQRLTMGTLVLDENLERGEWRRLTKEELEILRANII

SEQ ID NO: 13192 - protein, 954 aa, Streptococcus pneumoniae
MVSNNGLERTKMQDKIVIHGARAHNLKNIDVEIPRDKLVVVTGLSGSGKSSLAFDTLYAEGQRRYVESLSAYARQFLGNMEKPDVDAIDGLSPAISIDQKTTSKNPRSTVGTTTEINDYLRLLYARVGTPYCINGHGAINASSVEQIVDKVLELPERQRLQILAPVIRKKKGQHKSVIEKVQKDGYVRVRVDGEVYDVTEVPELSKSKQHNIDVVVDRIVIKEGIRSRLFDSIEAALRIAEGYVIIDTMDDSELLFSEHYACPVCGFTVPELEPRLFSFNAPFGSCSECDGLGIKLEVDTDLVVPDASKTLREGALAPWNPISSNYYPNMLEQAMKVFGVAMDKPFEDLSEEDKNLILYGSDGKEFHFHYENEFGGVRDIDIPFEGVINNIKRRYHETNSDYTRTQMRLYMNELTCGTCQGYRLNDQALSVRVGGQQGPHIGEISDLSIADHLDLVSQLTLSENEAIIARPILKEIKDRLTFLNNVGLNYLTLSRSAGTLSGGESQRIRLATQIGSNLSGVLYILDEPSIGLHQRDNDRLIASLKKMRDLGNTLIVVEHDEDTMREADYLIDVGPGAGVFGGEIVAAGTPKQVARNSKSITGQYLSGKRVIPVPEERRVGNGRFIEVIGARENNLQNVTARFPLGKFIAVTGVSGSGKSTLINSILKKAIAQKLNRNSDKPGKFKTITGIEHVDRLIDIDQSPIGRTPRSNPATYTGVFDDIRDLFAQTNEAKIRGYKKGRFSFNVKGGRCEACSGDGIIKIEMHFLPDVYVACEVCHGTRYNSETLEVHYKEKNISQVLDMTVNDAVEFFQHIPKIQRKLQTIKDVGLGYVTLGQPATTLSGGEAQRMKLASELHKRSTGKSFYILDEPTTGLHTEDIARLLKVLARFVDDGNTVLVIEHNLDVIKTADHIIDLGPEGGVGGGTIIVTGTPEEVAANEASYTGHYLKGKLHHE

SEQ ID NO: 13193 - protein, 353 aa, Streptococcus pneumoniae
MNKRVQAFLAKMQEKELDGIIINNLKNVYYLTGFWGSNGTVFISRDRQVLVTDSRYIIAAKQETSGFEIVADRDELAVIAGIVKDMGLTRIGFEDEISVSYYHRMQAAFAGLDLLPQTQFVEGLRMIKDEAEIAAIRKACSISDQAFRDALDFIKPGKTEIEIANFLDFRMRELGASGLSFDTILASGINSSKPHAHPMHKPVELGEAITMDFGCLYDHYVSDMTRTIYLGHVSDEQAEIYNTVLKANQALIDQAKAGLGFRDFDKIPRDIIIEAGYGDYFTHGIGHGIGLDIHEEPYFSQTSTETIKTGMVLTDEPGIYIEGKYGVRIEDDILITETGCELLTLAPKELIVI

SEQ ID NO: 13194 - protein, 88 aa, Streptococcus pneumoniae
MGFTEETVRFKLDDSNKKEISETLTDVYASLNDKGYNPINQIVGYVLSGDPAYVPRYNNARNQIRKYERDEIVEELVRYYLKGQGVDL

SEQ ID NO: 13195 - protein, 139 aa, Streptococcus pneumoniae
MRIMGLDVGSKTVGVAISDPLGFTAQGLEIIQINEEQGQFGFDRVKELVDTYKVERFVVGLPKNMNNTSGPRVEASQPYGAELEEFSGLPVDYQDERLTTVAAERMLIEQADISRNKRKKVIDKLAAQLILQNYLDRKF

SEQ ID NO: 13196 - protein, 102 aa, Streptococcus pneumoniae
MANKKIRIRLKAYEHRTLDTAAAKIVESATRTGAQVAGPIPLPTERSLYTIIRATHKYKDSREQFEMRTHKRLIDIVNPTQKTVDALMKLDLPSGVNVEIKL

SEQ ID NO: 13197 - protein, 208 aa, Streptococcus pneumoniae
MTKGILGKKVGMTQIFTEAGELIPVTVIEATPNVVLQVKTVETDGYNAIQVGFDDKREVLSNKPAKGHVAKANTAPKRFIREFKNVEGLEVGAEITVETFAAGDVVDVTGTSKGKGFQGVIKRHGQSRGPMAHGSRYHRRPGSMGPVAPNRVFKGKNLAGRMGGDRVTIQNLEVVQVVPEKNVILIKGNVPGAKKSLITIKSAVKAGK

SEQ ID NO: 13198 - protein, 207 aa, Streptococcus pneumoniae
MANVTLFDQTGKEAGQVVLSDAVFGIEPNESVVFDVIISQRASYRQGTHAVKNRSAVSGGGRKPWRQKGTGRARQGSIRSPQWRGGGVVFGPTPRSYGYKLPQKVRRLALKSVYSEKVAENKFVAVDALSFTAPKTAEFAKVLAALSIDSKVLVILEEGNEFAALSARNLPNVKVATATTASVLDIANSDKLLVTQAAISKIEEVLA

SEQ ID NO: 13199 - protein, 98 aa, Streptococcus pneumoniae
MNLYDVIKKPVITESSMAQLEAGKYVFEVDTRAHKLLIKQAVEAAFEGVKVANVNTINVKPKAKRVGRYTGFTNKTKKAIITLTADSKAIELFAAEAE

SEQ ID NO: 13200 - protein, 277 aa, Streptococcus pneumoniae
MGIRVYKPTTNGRRNMTSLDFAEITTSTPEKSLLVALKSKAGRNNNGRITVRHQGGGHKRFYRLVDFKRNKDNVEAVVKTIEYDPNRSANIALVHYTDGVKAYIIAPKGLEVGQRIVSGPEADIKVGNALPLANIPVGTLIHNIELKPGRGGELVRAAGASAQVLGSEGKYVLVRLQSGEVRMILGTCRATVGVVGNEQHGLVNLGKAGRSRWKGIRPTVRGSVMNPNDHPHGGGEGKAPVGRKAPSTPWGKPALGLKTRNKKAKSDKLIVRRRNEK

SEQ ID NO: 13201 - protein, 93 aa, Streptococcus pneumoniae
MGRSLKKGPFVDEHLMKKVEAQANDEKKKVIKTWSRRSTIFPSFIGYTIAVYDGRKHVPVYIQEDMVGHKLGEFAPTRTYKGHAADDKKTRRK

SEQ ID NO: 13202 - protein, 114 aa, Streptococcus pneumoniae
MAEITSAKAMARTVRVSPRKSRLVLDNIRGKSVADAIAILTFTPNKAAEIILKVLNSAVANAENNFGLDKANLVVSEAFANEGPTMKRFRPRAKGSASPINKRTAHITVAVAEK

SEQ ID NO: 13203 - protein, 217 aa, Streptococcus pneumoniae
MGQKVHPIGMRVGIIRDWDAKWYAEKEYADYLHEDLAIRKFVQKELADAAVSTIEIERAVNKVNVSLHTAKPGMVIGKGGANVDALRAKLNKLTGKQVHINIIEIKQPDLDAHLVGEGIARQLEQRVAFRRAQKQAIQRAMRAGAKGIKTQVSGRLNGADIARAEGYSEGTVPLHTLRADIDYAWEEADTTYGKLGVKVWIYRGEVLPARKNTKGGK

SEQ ID NO: 13204 - protein, 137 aa, Streptococcus pneumoniae
MLVPKRVKHRREFRGKMRGEAKGGKEVAFGEYGLQATTSHWITNRQIEAARIAMTRYMKRGGKVWIKIFPHKSYTAKAIGVRMGSGKGAPEGWVAPVKRGKVMFEIAGVSEEIAREALRLASHKLPVKCKFVKREAE

SEQ ID NO: 13205 - protein, 68 aa, Streptococcus pneumoniae
MKLNEVKEFVKELRGLSQEELAKRENELKKELFELRFQAATGQLEQTARLKEVKKQIARIKTVQSEAK

SEQ ID NO: 13206 - protein, 649 aa, Streptococcus pneumoniae
MSHIIELPEMLANQIAAGEVIERPASVVKELVENAIDAGSSQIIIEIEEAGLKKVQITDNGHGIAHDEVELALRRHATSKIKNQADLFRIRTLGFRGEALPSIASVSVLTLLTAVDGASHGTKLVARGGEVEEVIPATSPVGTKVCVEDLFFNTPARLKYMKSQQAELSHIIDIVNRLGLAHPEISFSLISDGKEMTRTAGTGQLRQAIAGIYGLVSAKKMIEIENSDLDFEISGFVSLPELTRANRNYISLFINGRYIKNFLLNRAILDGFGSKLMVGRFPLAVIHIHIDPYLADVNVHPTKQEVRISKEKELMTLVSEAIANSLKEQTLIPDALENLAKSTVRNREKVEQTILPLKENTLYYEKTEPSRPSQTEVADYQVELTDEGQDLTLFAKETLDRLTKPAKLHFAERKPANYDQLDHPELDLASIDKAYDKLEREEASSFPELEFFGQMHGTYLFAQGRDGLYIIDQHAAQERVKYEEYRESIGNVDQSQQQLLVPYIFEFPADDALRLKERMPLLEEVGVFLAEYGENQFILREHPIWMAEEEIESGIYEMCDMLLLTKEVSIKKYRAELAIMMSCKRSIKANHRIDDHSARQLLYQLSQCDNPYNCPHGRPVLVHFTKSDMEKMFRRIQENHTSLRELGKY

SEQ ID NO: 13207 - protein, 86 aa, Streptococcus pneumoniae
MERNNRKVLVGRVVSDKMDKTITVVVETKRNHPVYGKRINYSKKYKAHDENNVAKEGDIVRIMETRPLSATKRFRLVEVVEEAVII

SEQ ID NO: 13208 - protein, 122 aa, Streptococcus pneumoniae
MIQTETRLKVADNSGAREILTIKVLGGSGRKFANIGDVIVASVKQATPGGAVKKGDVVKAVIVRTKSGARRADGSYIKFDENAAVIIREDKTPRGTRIFGPVARELREGGFMKIVSLAPEVL

SEQ ID NO: 13209 - protein, 101 aa, Streptococcus pneumoniae
MFVKKGDKVRVIAGKDKGTEAVVLTAFPKVNKVIVEGVNIVKKHQRPTNELPQGGIIEKEAAIHVSNVQVLDKNGVAGRVGYKFVDGKKVRYNKKSGEVLD

SEQ ID NO: 13210 - protein, 180 aa, Streptococcus pneumoniae
MANRLKEKYLNEVVPALTEQFNYSSVMAVPKVDKIVLNMGVGEAVSNAKSLEKAAEELALISGQKPLITKAKKSIAGFRLREGVAIGAKVTLRGERMYEFLDKLVSVSLPRVRDFHGVPTKSFDGRGNYTLGVKEQLIFPEINFDDVDKTRGLDIVIVTTANTDEESRALLTGLGMPFAK

SEQ ID NO: 13211 - protein, 89 aa, Streptococcus pneumoniae
MAKKSMVAREAKRQKIVDRYAEKRAALKAAGDYEGLSKLPRNASPTRLHNRCRVTGRPHSVYRKFGLSRIAFRELAHKGQIPGVTKASW

SEQ ID NO: 13212 - protein, 132 aa, Streptococcus pneumoniae
MVMTDPIADFLTRIRNANQAKHEVLEVPASNIKKGIAEILKREGFVKNVEIIEDDKQGVIRVFLKYGPNGEKVITNLKRVSKPGLRVYKKREDLPKVLNGLGIAILSTSEGLLTDKEARQKNVGGEVIAYVW

SEQ ID NO: 13213 - protein, 178 aa, Streptococcus pneumoniae
MSRIGNKVIVLPAGVELANNDNVVTVKGPKGELTREFSKDIEIRVEGTEVTLHRPNDSKEMKTIHGTTRALLNNMVVGVSEGFKKELEMRGVGYRAQLQGSKLVLAVGKSHPDEVEAPEGITFELPNPTTIVVSGISKEVVGQTAAYVRSLRSPEPYKGKGIRYVGEFVRRKEGKTGK

SEQ ID NO: 13214 - protein, 131 aa, Streptococcus pneumoniae
MHSTRFKTKEVKTVISKPDKNKLRQKRHRRVRGKLSGTADRPRLNVFRSNTGIYAQVIDDVAGVTLASASTLDKEVSKGTKTEQAVAVGKLVAERANAKGISEVVFDRGGYLYHGRVKALADAARENGLKF

SEQ ID NO: 13215 - protein, 164 aa, Streptococcus pneumoniae
MAFKDNAVELEERVVAVNRVTKVVKGGRRLRFAALVVVGDHNGRVGFGTGKAQEVPEAIRKAVDDAKKNLIEVPMVGTTIPHEVLSEFGGAKVLLKPAVEGSGVAAGGAVRAVVELAGVADITSKSLGSNTPINIVRATVEGLKQLKRAEEIAALRGISVSDLA

SEQ ID NO: 13216 - protein, 74 aa, Streptococcus pneumoniae
MVFQFLIWHKKGDKMAQIKITLTKSPIGRIPSQRKTVVALGLGKLNSSVIKEDNAAIRGMITAVSHLVTVEEVN

SEQ ID NO: 13217 - protein, 146 aa, Streptococcus pneumoniae
MKLHELKPAEGSRKVRNRVGRGTSSGNGKTSGRGQKGQKARSGGGVRLGFEGGQTPLFRRLPKRGFTNINAKEYAIVNLDQLNVFEDGAEVTPVVLIEAGIVKAEKSGIKILGNGELTKKLTVKAAKFSKSAEEAITAKGGSVEVI

SEQ ID NO: 13218 - protein, 436 aa, Streptococcus pneumoniae
MFFKLLREALKVKQVRSKILFTIFIVLVFRIGTSITVPGVNANSLNALSGLSFLNMLSLVSGNALKNFSIFALGVSPYITASIVVQLLQMDILPKFVEWGKQGEVGRRKLNQATRYIALVLAFVQSIGITAGFNTLAGAQLIKTALTPQVFLTIGIILTAGSMIVTWLGEQITDKGYGNGVSMIIFAGIVSSIPEMIQGIYVDYFVNVPSSRITSSIIFVIILIITVLLIIYFTTYVQQAEYKIPIQYTKVAQGAPSSSYLPLKVNPAGVIPVIFASSITAAPAAILQFLSATGHDWAWVRVAQEMLATTSPTGIAMYALLIILFTFFYTFVQINPEKAAESLQKSGAYIHGVRPGKGTEEYMSKLLRRLATVGSLFLGVISILPIAAKDVFGLSDVVAFGGTSLLIIISTGIEGIKQLEGYLLKRKYVGFMDRTE

SEQ ID NO: 13219 - protein, 212 aa, Streptococcus pneumoniae
MNLLIMGLPGAGKGTQAAKIVEQFHVAHISTGDMFRAAMANQTEMGVLAKSYIDKGELVPDEVTNGIVKERLSQDDIKETGFLLDGYPRTIEQAHALDKTLAELGIELEGIINIEVNPDSLLERLSGRIIHRVTGETFHKVFNPPVDYKEEDYYQREDDKPETVKRRLDVNIAQGEPIIAHYRAKGLVHDIEGNQDINDVFSDIEKVLTNLK

SEQ ID NO: 13220 - protein, 72 aa, Streptococcus pneumoniae
MAKDDVIEVEGKVVDTMPNAMFTVELENGHQILATVSGKIRKNYIRILAGDRVTVEMSPYDLTRGRITYRFK

SEQ ID NO: 13221 - protein, 121 aa, Streptococcus pneumoniae
MARIAGVDIPNDKRVVISLTYVYGIGLATSKKILAAAGISEDVRVRDLTSDQEDAIRREVDAIKVEGDLRREVNLNIKRLMEIGSYRGIRHRRGLPVRGQNTKNNARTRKGKAVAIAGKKK

SEQ ID NO: 13222 - protein, 118 aa, Streptococcus pneumoniae
MKKNIESGIAHIHATFNNTIVMITDVHGNAIAWSSAGALGFKGSRKSTPFAAQMASEAAAKSAQEHGLKSVEVTVKGPGSGRESAIRALAAAGLEVTAIRDVTPVPHNGARPPKRRRV

SEQ ID NO: 13223 - protein, 311 aa, Streptococcus pneumoniae
MIEFEKPNITKIDENKDYGKFVIEPLERGYGTTLGNSLRRVLLASLPGAAVTSINIDGVLHEFDTVPGVREDVMQIILNIKGIAVKSYVEDEKIIELDVEGPAEVTAGDILTDSDIEIVNPDHYLFTIGEGSSLKATMTVNSGRGYVPADENKKDNAPVGTLAVDSIYTPVTKVNYQVEPARVGSNDGFDKLTLEILTNGTIIPEDALGLSARILTEHLDLFTNLTEIAKSTEVMKEADTESDDRILDRTIEELDLSVRSYNCLKRAGINTVHDLTEKSEAEMMKVRNLGRKSLEEVKLKLIDLGLGLKDK

SEQ ID NO: 13224 - protein, 128 aa, Streptococcus pneumoniae
MAYRKLGRTSSQRKAMLRDLTTDLLINESIVTTEARAKEIRKTVEKMITLGKRGDLHARRQAAAFVRNEIASENYDEATDKYTSTTALQKLFSEIAPRYAERNGGYTRILKTEPRRGDAAPMAIIELV

SEQ ID NO: 13225 - protein, 211 aa, Streptococcus pneumoniae
MFTGIIEEIGKVERIQKDSRNCKLSIKASKILTDIHLGDSIAVNGICLTVTHFNHQSFTVDVMNETWSRTALTLLKHGSEVNLERALSVNGRLGGHVVTGHIDGTGKISSIKKDDNAVWHQINTQKEILDLIVEKGSITIDGISLTVAKVSKVNFSVSVIPHTLEQTILKSKQVGSTVNLENDILGKYVQKLMDNSPKSEISKELLYQNGF

SEQ ID NO: 13226 - protein, 597 aa, Streptococcus pneumoniae
MSFYNHKEIEPKWQGYWAEHHTFKTGTDASKPKFYALDMFPYPSGVGLHVGHPEGYTATDILSRYKRAQGYNVLHPMGWDAFGLPAEQYAMDTGNDPAEFTAENIANFKRQINALGFSYDWDREVNTTDPNYYKWTQWIFTKLYEKGLAYEAEVPVNWVEELGTAIANEEVLPDGTSERGGYPVVRKPMRQWMLKITAYAERLLNDLDELDWSESIKDMQRNWIGKSTGANVTFKVKGTDKEFTVFTTRPDTLFGATFTVLAPEHELVDAITSSEQAEAVADYKHQASLKSDLVRTDLAKEKTGVWTGAYAINPVNGKEMPIWIADYVLASYGTGAVMAVPAHDQRDWEFAKQFDLPIVEVLEGGNVEEAAYTEDGLHVNSDFLDGLNKEDAIAKIVACLEEKGCGQEKVTYRLRDWLFSRQRYWGEPIPIIHWEDGTSTAVPETELPLVLPVTKDIRPSGTGESPLANLTDWLEVTREDGVKGRRETNTMPQWAGSSWYYLRYIDPHNTEKLADEDLLKQWLPVDIYVGGAEHAVLHLLYARIWHKFLYDLGVVPTKEPFQKLFNQGMILGQATVTTVVLLWQPTRLKNVMVPSFI

SEQ ID NO: 13227 - protein, 252 aa, Streptococcus pneumoniae
MFGFFKKDKAVEVEVPTQVPAHIGIIMDGNGRWAKKRMQPRVFGHKAGMEALQTVTKAANKLGVKVITVYAFSTENWTRPDQEVKFIMNLPVEFYDNYVPELHANNVKIQMIGETDRLPKQTFEALTKAEELTKNNTGLILNFALNYGGRAEITQALKLISQDVLDAKINPGDITEELIGNYLFTQHLPKDLRDPDLIIRTSGELRLSNFLPWQGAYSELYFTDTLWPDFDEAALQEAILAYNRRHRRFGGV

SEQ ID NO: 13228 - protein, 617 aa, Streptococcus pneumoniae
MKQSKMPIPTLREMPSDAQVISHALMLRAGYVRQVSAGVYSYLPLANRVIEKAKNIMRQEFEKIGAVEMLAPALLSAELWRESGRYETYGEDLYKLKNREKSDFILGPTHEETFTAIVRDSVKSYKQLPLNLYQIQPKYRDEKRPRNGLLRTREFIMKDAYSFHANYDSLDSVYDEYKAAYERIFTRSGLDFKAIIGDGGAMGGKDSQEFMAITSARTDLDRWVVLDKSVVSFDEIPVEVQEEIKAELLKWIVSGEDTIAYSSESSYAANLEMATNEYKPSNRVVAEEEVTRVATPDVKSIDEVAAFLNVPEEQTIKTLFYIADGELVAALLVGNDQLNEVKLKNHLGADFFDVASEEEVANVVQAGFGSLGPVGLPENIKIIADRKVQDVRNAVVGANEDGYHLTGVNPGRDFTAEYVDIREVREGEISPDGQGVLNFARGIEIGHIFKLGTRYSASMGADVLDENGRAVPIIMGCYGIGVSRLLSAVMEQHARLFVNKTPKGEYRYAWGINFPKELAPFDVHLITVNVKDEEAQALTEKLEASLMGAGYEVLTDDRNERVGVKFSDSDLIGLPIRITVGKKAADGIVEVKIKATGDTIEVHADNVLETLEILSKK

SEQ ID NO: 13229 - protein, 459 aa, Streptococcus pneumoniae
MLRFPKDFVWGSSTSGPQTEGRVAGDGKGDNLWDYWFQVEPNRYYNGIGSDKTSTFYENWERDIELLLETGHTVFRTSIQWSRIFPQGCGKVNPQGVDFYRKVFEAIKAKGIRLLVNLYHFDLPFALQEDGDGWENKATVSAYEDYARFCFETYGDLVDQWITFNEPIVPVEFGYFYDAHYPHKVDAEAAVKVAYHTQLASSRAVKACHELLPDSKIGIVLNLTPAYPRSQHPADVKAARIAALFQAQSFLDPSVLGTYPQELVEILHEHGLLPDATEEELELIRDNTVDFLGVNYYQPLRVMAPRFAKHPESPLLPEHFYEPYVMPGRKINSHRGWEIYEQGIYDIAQNIKENYGNIEWMLTENGMGVEGEEKFRQDGMIQDDYRIDFVKGHLRELHRAIEDGANCKGYLIWTFIDCWSWLNSYKNRYGLVELDLETQERRLKKSGHWFKELSDNNGF

SEQ ID NO: 13230 - protein, 598 aa, Streptococcus pneumoniae
MCGIVGVVGNTNATDILIQGLEKLEYRGYDSAGIFVLDGADNHLVKAVGRIAELSAKTAGVEGTTGIGHTRWATHGKPTEDNAHPHRSETERFVLVHNGVIENYLEIKEEYLAGHHFKGQTDTEIAVHLIGKFAEEDGLSVLEAFKKALHIIRGSYAFALIDSENPDVIYVAKNKSPLLIGLGEGYNMVCSDAMAMIRETNQYMEIHDQELVIVKADSVEVQDYDGNSRERASYTAELDLSDIGKGTYPYYMLKEIDEQPTVMRKLIQAYTDDAGQVVIDPAIIKAVQDADRIYILAAGTSYHAGFASKKMLEELTDTPVELGISSEWGYGMPLLSKKPLFIFISQSGETADSRQVLVKANEMGIPSLTVTNVPGSTLSREANYTMLLHAGPEIAVASTKAYTAQIAALAFLAKAVGEANGNAKAQAFDLVHELSIVAQSIESTLSEKETIEAKVRELLETTRNAFYIGRGQDYYVAMEASLKLKEISYIQCEGFAAGELKHGTIALIEEGTPVLALLSDPVLANHTRGNIQEVAARGAKVLTIAEENVAKDTDDIVLTTVHPYLSPISMGYRRNWLLTLQPSTVASMWINHVTLLNQ

SEQ ID NO: 13231 - protein, 137 aa, Streptococcus pneumoniae
MPTINQLVRKPRKSKVEKSKSPALNVGYNSHKKVQTNVSSPQKRGVATRVGTMTPKKPNSALRKFARVRLSNLIEVTAYIPGIGHNLQEHSVVLLRGGRVKDLPGVRYHIVRGALDTAGVNDRKQGRSKYGTKRPKA

SEQ ID NO: 13232 - protein, 156 aa, Streptococcus pneumoniae
MSRKNRAPKRDVLPDPLYNSQLVTRLINRVMLDGKRGTAASIVYGAFEQIKEATGNDALEVFETAMENIMPVLEVRARRVGGSNYQVPVEVRPERRTTLGLRWLVTIARLRGEHTMQDRLAKEILDAANNTGAAVKKREDTHRMAEANRAFAHFRW

SEQ ID NO: 13233 - protein, 693 aa, Streptococcus pneumoniae
MAREFSLEKTRNIGIMAHVDAGKTTTTERILYYTGKIHKIGETHEGASQMDWMEQEQERGITITSAATTAQWNNHRVNIIDTPGHVDFTIEVQRSLRVLDGAVTVLDSQSGVEPQTETVWRQATEYGVPRIVFANKMDKIGADFLYSVSTLHDRLQANAHPIQLPIGSEDDFRGIIDLIKMKAEIYTNDLGTDILEEDIPAEYLDQAQEYREKLIEAVAETDEELMMKYLEGEEITNEELKAGIRKATINVEFFPVLCGSAFKNKGVQLMLDAVIDYLPSPLDIPAIKGINPDTDAEEIRPASDEEPFAALAFKIMTDPFVGRLTFFRVYSGVLQSGSYVLNTSKGKRERIGRILQMHANSRQEIDTVYSGDIAAAVGLKDTTTGDSLTDEKAKIILESINVPEPVIQLMVEPKSKADQDKMGIALQKLAEEDPTFRVETNVETGETVISGMGELHLDVLVDRMRREFKVEANVGAPQVSYRETFRASTQARGFFKRQSGGKGQFGDVWIEFTPNEEGKGFEFENAIVGGVVPREFIPAVEKGLVESMANGVLAGYPMVDVKAKLYDGSYHDVDSSETAFKIAASLSLKEAAKSAQPAILEPMMLVTITVPEENLGDVMGHVTARRGRVDGMEAHGNSQIVRAYVPLAEMFGYATVLRSASQGRGTFMMVFDHYEDVPKSVQEEIIKKNKGED

SEQ ID NO: 13234 - protein, 413 aa, Streptococcus pneumoniae
MVLPNFKENLEKYAKLLVANGINVQPGHTLALSIDVEQRELAHLIVKEAYALGAHEVIVQWTDDVINREKFLHAPMERLDNVPEYKIAEMNYLLENKASRLGVRSSDPGALNGVDADKLSASAKAMGLAMKPMRIATQSNKVSWTVAAAAGLEWAKKVFPNAASDEEAVDLLWDQIFKTCRVYEADPVKAWEEHAAILKSKADMLNKEQFSALHYTAPGTDLTLGLPKNHVWESAGAVNAQGEGFLPNMPTEEVFTAPDFRRADGYVTSTKPLSYNGNIIEGIKVIFKDGQIVDITAEKGDQVMKDLVFENAGARALGECALVPDPSPISQSGITFFNTLFDENASNHLAIGAAYATSLVDGAEMSEEELEAAGLNRSDVHVDFMIGSNQMDIDGIREDGTRVPLFRNGNWAN

SEQ ID NO: 13235 - protein, 339 aa, Streptococcus pneumoniae
MENLVKSTSDTYIPEEIMSFSDLKLFALSSNKELAERVAQEIGIELGKSSVRQFSDGEIQVNIEESIRGKHVFILQSTSSPVNDNLLEILIMVDALKRASAESVNVVMPYYGYARQDRKARAREPITSKLVANMLEVAGVDRLLTIDLHAAQIQGFFDIPVDHLMGAPLIADYFERRGMVGSDYVVVSPDHGGVTRARKLAEFLKTSIAIIDKRRSVDKMNTSEVMNIIGKVEGKTCILIDDMIDTAGTICHAADALAEAGAVEVYASCTHPVLSGPATDNIQKSAIKKLVVLDTIYLPEERLIDKIEQISIAHLLGDAIVRIHEKRPLSPLFDIEKKI

SEQ ID NO: 13236 - protein, 889 aa, Streptococcus pneumoniae
MVFFDSFLYNGCMDKKKLLLIDGSSVAFRAFFALYQQLDRFKNAAGLHTNAIYGFQLMLSHLLERVEPSHILVAFDAGKTTFRTEMYADYKGGRAKTPDEFREQFPFIRELLDHMGIRHYELAQYEADDIIGTLDKLAEQDGFDITIVSGDKDLIQLTDEHTVVEISKKGVAEFEAFTPDYLMEEMGLTPAQFIDLKALMGDKSDNIPGVTKVGEKTGIKLLLEHGSLEGIYENIDGMKTSKMKENLINDKEQAFLSKTLATIDTKAPIAIGLEDLVYSGPDVENLGKFYDEMGFKQLKQALNMSSADVAEGLDFTIVDQISQDMLSEESIFHFELFGENYHTDNLVGFAWSCGDQLYATDKLELLQDPIFKDFLEKTSLRVYDFKKVKVLLQRFGVDLQAPAFDIRLAKYLLSTVEDNEIATIASLYGQTYLVDDETFYGKGVKKAIPEREKFLEHLACKLAVLVETEPILLEKLSENGQLELLYDMEQPLAFVLAKMEIAGIVVKKETLLEMQAENELVIEKLTQEIYELAGEEFNVNSPKQLGVLLFEKLGLPLEYTKKTKTGYSTAVDVLERLAPIAPIVKKILDYRQIAKIQSTYVIGLQDWILADGKIHTRYVQDLTQTGRLSSVDPNLQNIPARLEQGRLIRKAFVPEWEDSVLLSSDYSQIELRVLAHISKDEHLIKAFQEGADIHTSTAMRVFGIERPDNVTANDRRNAKAVNFGVVYGISDFGLSNNLGISRKEAKAYIDTYFERFPGIKNYMDEVVREARDKGYVETLFKRRRELPDINSRNFNIRGFAERTAINSPIQGSAADILKIAMIQLDKALVAGGYQTKMLLQVHDEIVLEVPKSELVEMKKLVKQTMEEAIQLSVPLIADENEGATWYEAK

SEQ ID NO: 13237 - protein, 442 aa, Streptococcus pneumoniae
MYVRKEEPEGSDKIMTSVVVVGTQWGDEGKGKITDFLSANAEVIARYQGGDNAGHTIVIDGKKFKLHLIPSGIFFPEKISVIGNGMVVNPKSLVKELSYLHEEGVTTDNLRISDRAHVILPYHIELDRLQEEAKGDNKIGTTIKGIGPAYMDKAARVGIRIADLLDKDIFRERLERNLAEKNRLFEKLYDSKAIVFDDIFEEYYEYGQQIKKYVIDTSVILNDALDNGKRVLFEGAQGVMLDIDQGTYPFVTSSNPVAGGVTIGSGVGPSKIDKVVGVCKAYTSRVGDGPFPTELFDEVGERIREVGHEYGTTTGRPRRVGWFDSVVMRHSRRVSGITNLSLNSIDVLSGLDTVKICVAYDLDGQRIDYYPASLEQLKRCKPIYEELPGWSEDITGVRNLEDLPENARNYVRRVSELVGVRISTFSVGPGREQTNILESVWS

SEQ ID NO: 13238 - protein, 432 aa, Streptococcus pneumoniae
MINRYSRPEMANIWSEENKYRAWLEVEILSDEAWAELGEIPKEDVALIRKKADFDIDRILEIEQETRHDVVAFTRAVSETLGEERKWVHYGLTSTDVVDTAYGYLYKQANDIIRRDLENFTNIIADKAKEHKFTIMMGRTHGVHAEPTTFGLKLATWYSEMKRNIERFEHAAAGVEAGKISGAVGNFANIPPFVEEYVCNKLGIRAQEISTQVLPRDLHAEYFAVLASIATSIERMATEIRGLQKSEQREVEEFFAKGQKGSSAMPHKRNPIGSENMTGLARVIRGHMITAYENVALWHERDISHSSAERIITPDTTILIDYMLNRFGNIVKNLTVFPENMIRNMNSTFGLIFSQRAMLTLIEKGMTREQAYDLVQPKTAYSWDNQVDFKPLLEADSEVTSRLTQEEIDEIFNPVYYTKRVDDIFERLGLGD

SEQ ID NO: 13239 - protein, 284 aa, Streptococcus pneumoniae
MTYEYKSLIYLAETALNVKDLASQTAFYQQVIGLEILSQTETESILGLGGKVLVQLIQAQESGEVREHYGLYHLAILLPTRKALADVLKHLTDLQIPLVGGADHGYSEAIYLEDLEGNGIELYRDKPVSTWDIREDGRIIGVTEALAAQDIYELGERVEPFILAEGTRMGHIHLSVKDSRKSSQFYQKVLGLEDKFSVPSASWIAAEDYHHHLAVNEWRGKGLASRKQGLPGLAYYVIEVAHKKELLTIAQRAQEVDAPIKWMTSSKLEITDSDGIVTRIRLAR

SEQ ID NO: 13240 - protein, 203 aa, Streptococcus pneumoniae
MSRYTGPSWKQARRLGLSLTGTGKELARRTTYQDNTDQTTVLNCQNTVCNWLKNTKLRFTYGVGEKQFRNLFVQATKIKGGILGFNFMLLLERRLDNVVYRLGLATTRRQARQFVNHGHILVDGKRVDIPSYRVTPGQVISVREKSLKVPAILEAVEATLGRPAFVSFDAEKLEGSLTRLPERDEINPEINEALVVEFYNKML

SEQ ID NO: 13241 - protein, 420 aa, Streptococcus pneumoniae
MEEVEVAEVKNARVSLTGEKTKPMKLAEVTSINVNRTKTEMEEFNRVLGGGVVPGSLVLIGGDPGIGKSTLLLQVSTQLSQVGTVLYVSGEESAQQIKLRAERLGDIDSEFYLYAETNMQSVRAEVERIQPDFLIIDSIQTIMSPEISGVQGSVSQVREVTAELMQLAKTNNIAIFIVGHVTKEGTLAGPRMLEHMVDTVLYFEGERHHTFRILRAVKNRFGSTNEIGIFEMQSGGLVEVLNPSQVFLEERLDGATGSSIVVTMEGTRPILAEVQALVTPTMFGNAKRTTTGLDFNRASLIMAVLEKRAGLLLQNQDAYLKSAGGVKLDEPAIDLAVAVAIASSYKDKPTNPQECFVGELGLTGEIRRVNRIEQRINEAAKLGFTKIYVPKNSLTGITLPKEIQVIGVTTIQEVLKKVFA

SEQ ID NO: 13242 - protein, 328 aa, Streptococcus pneumoniae
MAKDIRVLLYYLYTPIENAEQFAADHLAFCKSIGLKGRILVADEGINGTVSGDYETTQKYMDYVHSLPGMEELWFKIDEENEQAFKKMFVRYKKEIVHLGLEDNDFDNDINPLETTGAYLSPKEFKEALLDKDTVVLDTRNDYEYDLGHFRGAIRPDIRNFRELPQWVRDNKEKFMDKRVVVYCTGGVRCEKFSGWMVREGYKDVGQLHGGIATYGKDPEVQGELWDGKMYVFDERIAVDVNHVNPTIVGKDWFDGTPCERYVNCGNPFCNRRILTSEENEDKYLRGCSHECRVHPRNRYVSKNELTQAEVIERLAAIGESLDQAATV

SEQ ID NO: 13243 - protein, 616 aa, Streptococcus pneumoniae
MNKKLTDYVIDLVEILNKQQKQVFWGIFDIFSMVVSIIVSYILFYGLINPAPVDYIIYTSLAFLFYQLMIGFWGLNASISRYSKITDFMKIFFGVTASSVLSYSICYAFLPLFSIRFIILFILLSTFLILLPRITWQLIYSRRKKGSGDGEHRRTFLIGAGDGGALFMDSYQHPTSELELVGILDKDSKKKGQKLGGIPVLGSYDNLPELAKRHQIERVIVAIPSLDPSEYERILQMCNKLGVKCYKMPKVETVVQGLHQAGTGFQKIDITDLLGRQEIRLDESRLGAELTGKTILVTGAGGSIGSEICRQVSRFNPERIVLLGHGENSIYLVYHELIRKFQGIDYVPVIADIQDYDRLLQVFEQYKPAIVYHAAAHKHVPMMERNPKEAFKNNIRGTYNVAKAVDEAKVSKMVMISTDKAVNPPNVMGATKRVAELIVTGFNQRSQSTYCAVRFGNVLGSRGSVIPVFERQIAEGGPVTVTDFRMTRYFMTIPEASRLVIHAGAYAKDGEVFILDMGKPVKIYDLAKKMVLLSGHTESEIPIVEVGIRPGEKLYEELLVSTELVDNQVMDKIFVGKVNVMPLESINQKIREFRTLSGDELKQAIIAFANQTTHIE

SEQ ID NO: 13244 - protein, 289 aa, Streptococcus pneumoniae
MKIIVPATSANIGPGFDSVGVAVTKYLQIEVCEERDEWLIEHQIGKWIPHDERNLLLKIALQIVPDLQPRRLKMTSDVPLARGLGSSSSVIVAGIELANQLGQLNLSDHEKLQLATKIEGHPDNVAPAIYGNLVIASSVEGQVSAIVADFPECDFLAYIPNYELRTRDSRSVLPKKLSYKEAVAASSIANVAVAALLAGDMVTAGQAIEGDLFHERYRQDLVREFAMIKQVTKENGAYATYLSGAGPTVMVLASHDKMPTIKAELEKQPFKGKLHDLRVDTQGVRVEAK

SEQ ID NO: 13245 - protein, 488 aa, Streptococcus pneumoniae
MKIKEQTRKLAVGCSKHSFEVVDKTDEVSSKHCFEVADRTDEVSNHTYGKVNLKWFEESTTCLLEKEPIMKVFQHVNIVTCDQDFHVYLDGILAVKDSQIVYVGQDKPAFLEQAEQIIDYQGAWIMPGLVNCHTHSAMTGLRGIRDDSNLHEWLNDYIWPAESEFTSDMTTNAVKEALTEMLQSGTTTFNDMYNPNGVDIQQIYQVVKTSKMRCYSSPTLFCSETETTAETISRTRSIIDEILKYKNPNFKVMVAPHSPYSCSRDLLEASLEMAKELNIPLHVHVAETKEESGIILKRYGKRPLAFLEELGYLDHPSVFAHGVELNEREIERLASSQVAIAHNPISNLKLASGIAPIIQLQKAGVAVGIATDSVASNNNLDMFKEGRTAALLQKMKSGDASQFPIETALKVLTIEGAKALGMENQIGSLEVGKQADFLVIQPQGKIHLQPQENMLSHLVYAVKSSDVDDVYIAGEQVVKQGQVLTVEL

SEQ ID NO: 13246 - protein, 170 aa, Streptococcus pneumoniae
MNTLMSEAIIAKKAELVDVVAEKMKAAASIVVVDARGLTVEQDTVLRRELRGSEVEYKVIKNSILRRAAEKAGLEDLASVFVGPSAVAFSNEDVIAPAKILNDFSKNAEALEIKGGAIEGAVASKEEILALATLPNREGLLSMLLSVLQAPVRNVALAVKAVAESKEDAA

SEQ ID NO: 13247 - protein, 122 aa, Streptococcus pneumoniae
MALNIENIIAEIKEASILELNDLVKAIEEEFGVTAAAPVAVAAADAADAGAAKDSFDVELTSAGDKKVGVIKVVREITGLGLKEAKELVDGAPALVKEGVATAEAEEIKAKLEEAGASVTLK

SEQ ID NO: 13248 - protein, 660 aa, Streptococcus pneumoniae
MNQTVLDVKNLKTEFITDKKAFPIIKDVNFTLERGKVLGIVGESGCGKSVTVNTVLNLLPKNGRIAEGEITYFDEDKPIELQKLKQYGKEFRKLRGENISMIFQDPMSALNPVYTIGNQITEVLHEHYDISKEEANKRAIEMLEKLGIHNAAERMNDYPHQFSGGQRQRIVIAIAMVCNPDILIADEPTTALDVTIQAQILDLLDDLRKEHGTSIILITHDLGVIAQIADEVAVMYAGEVVEVGTVAQIFDQPKHPYTRSLLRSIPNPENMDKKLHVIQGSVPSISEISEKGCRFANRIPWLEKEHHEEEPQLHDLGDGHFVRCSCYKHFFFEDKEEETLAEKHVGNVVLEVKNIKKYYYPKKQLFKPLGSPLKALDDVSLELRKGTTIGIVGESGSGKSTIAKSLMKLHDITDGEINIDLNGKTQNIYGIKRKEDLDFRKKVQMVFQDPYASLNPTKKIYNSFDEPMIVHNIGNKEERFERMKEALKMVNVPVEYLERYPHEFSGGQRQRLCIARALCMKPEILILDEPVSALDLSVQAQVLNYLVEIQNKEDLTYVFISHDLGVVKYMCDYLYVIHKGRIVEAGSREDIYNNPMHIYTKKLLAAIPEVDYHFKEALATKRKENEVEFKAQYHEFYDEDGRAYDLKQVSPTHFVALKPE

SEQ ID NO: 13249 - protein, 334 aa, Streptococcus pneumoniae
MQKNIYFVVLDLHTTDRDKIIQLFKDWTDYSAKLVEGELVKKDGQNALFPPSDTGETVGLNPHRLTLTFGVSASFLKRMNLENKRPRLFRDLPLFPKEQLREKYTGGDIVIHACADDEQIAFHAIRNLIRKGRNAVPLRWSQSGFAAIGDRMETPWNLFGFKDGTANPTKEQDFDRVIWADSKDWMENGSYMAVRRIQMFLETWDRTSLEEQENTFGRYKESGAPFGKKNEFDEVDLSLLPDDSHVCLAKEVDKPLLRRSYSYSDGIDEKTGQFDTGLLFISFQKDPDNFVKVQTNLGATDKMNEYITHIGSGLFTCFGGVEKGGYIGQKLLEG

SEQ ID NO: 13250 - protein, 94 aa, Streptococcus pneumoniae
MARKETMAERKYCKMKKDIHPEYRPVVFMDTTTGYQFLSGSTKRSNETVEFEGETYPLIRVEISSDSHPFYTGRQKFTQADGRVDRFNKKYGLK

SEQ ID NO: 13251 - protein, 115 aa, Streptococcus pneumoniae
MNPLIQSLTEGQLRTDIPSFRPGDTVRVHAKVVEGNRERIQIFEGVVIARKGAGISENYTVRKISNGIGVERIFPIHTPRVEKIEVVRYGKVRRAKLYYLRALQGKAARIKEIRR

SEQ ID NO: 13252 - protein, 268 aa, Streptococcus pneumoniae
MSIKLIAVDIDGTLVNSQKEITPEVFSAIQDAKEAGVKVVIATGRPIAGVAKLLDDLQLRDQGDYVVTFNGALVQETATGHEIISESLTYEDYLDMEFLSRKLGVHMHAITKDGIYTANRNIGKYTVHESTLVSMPIFYRTPEEMAGKEIVKCMFIDEPEILDAAIEKIPAEFYEHYSINKSAPFYLELLKKNVDKGSAITHLAEKLGLTKDETMAIGDEENDRAMLEVVGNPVVMENGNPEIKKIAKYITKTNDESGVAHAIRTWVL

SEQ ID NO: 13253 - protein, 110 aa, Streptococcus pneumoniae
MEIEKTNRMNALFEFYAALLTDKQMNYIELYYADDYSLAEIAEEFGVSRQAVYDNIKRTEKILEDYEMKLHMYSDYIVRSQIFDQILERYPKDNFLQEQIEILTSIDNRE

SEQ ID NO: 13254 - protein, 523 aa, Streptococcus pneumoniae
MAFESLTERLQNVFKNLRKKGKISESDVQEATKEIRLALLEADVALPVVKDFIKKVRERAVGHEVIDTLNPAQQIIKIVDEELTAVLGSDTAEIIKSPKIPTIIMMVGLQGAGKTTFAGKLANKLKKEENARPLMVAADIYRPAAIDQLKTLGQQIDVPVFALGTEVPAVEIVRQGLEQAQTNHNDYVLIDTAGRLQIDELLMNELRDVKALAQPNEILLVVDAMIGQEAANVAREFNAQLEVTGVILTKIDGDTRGGAALSVRHITGKPIKFTGTGEKITDIETFHPDRMSSRILGMGDMLTLIEKASQEYDEQKALEMAEKMRENTFDFNDFIDQLDQVQNMGPMEDLLKMIPGMANNPALQNMKVDERQIARKRAIVSSMTPEERENPDLLNPSRRRRIAAGSGNTFVEVNKFIKDFNQAKQLMQGVMSGDMNKMMKQMGINPNNLPKNMPNMGGMDMSALEGMMGQGGMPDLSALGGAGMPDMSQMFGGGLKGKIGEFAMKQSMKRMANKMKKAKKKRK

SEQ ID NO: 13255 - protein, 245 aa, Streptococcus pneumoniae
MILKKEITMKPETFYNLLAEQNLPLSNQQKEQFERYFELLVEWNEKINLTAITDKEEVYLKHFYDSIAPILQGLIPNETIKLLDIGAGAGFPSLPMKILYPELDVTIIDSLNKRINFLQLLAQELDLNGVHFYHGRAEDFAQDKNFRAQYDFVTARAVARMQVLSELTIPYLKVGGKLLALKASNAPEELLEAKNALNLLFSKVEDNLSYALPNRDPRYITVVEKKKETPNKYPRKAGMPNKRPL

SEQ ID NO: 13256 - protein, 235 aa, Streptococcus pneumoniae
MIYAGILAGGTGTRMGISNLPKQFLELGDRPILIHTIEKFVLEPSIEKIVVGVHGDWVSHAEDLVDKYLPLYKERIIITKGGADRNTSIKNIIEAIDAYRPLTPEDIVVTHDSVRPFITLRMIQDNIQLAQNHDAVDTVVEAVDTIVESTNGQFITDIPNRAHLYQGQTPQTFRCKDFMDLYGSLSDEEKEILTDACKIFVIKGKDVALAKGEYSNLKITTVTDLKIAKSMIEKD

SEQ ID NO: 13257 - protein, 340 aa, Streptococcus pneumoniae
MINQIYQLTKPKFINVKYQEEAIDQENHILIRPNYMAVCHADQRYYQGKRDPKILNKKLPMAMIHESCGTVISDPTGTYEVGQKVVMIPNQSPMQSDEEFYENYMTGTHFLSSGFDGFMREFVSLPKDRVVAYDAIEDTVAAITEFVSVGMHAMNRLLTLAHSKRERIAVIGDGSLAFVVANIINYTLPEAEIVVIGRHWEKLELFSFAKECYITDNIPEDLAFDHAFECCGGDGTGPAINDLIRYIRPQGTILMMGVSEYKVNLNTRDALEKGLILVGSSRSGRIDFENAIQMMEVKKFANRLKNILYLEEPVREIKDIHRVFATDLNTAFKTVFKWEV

SEQ ID NO: 13258 - protein, 297 aa, Streptococcus pneumoniae
MMRIKQMTENRYELNKNLAQMLKGGVIMDVQNPEQARIAEAAGAAAVMALERIPADIRAAGGVSRMSDPKMIKEIQEAVSIPVMAKVRIGHFVEAQILEAIEIDYIDESEVLSPADDRFHVDKKEFQVPFVCGAKDLGEALRRIAEGASMIRTKGEPGTGDIVQAVRHMRMMNQEIRRIQNLREDELYVAAKDLQVPVELVQYVHEHGKLPVVNFAAGGVATPADAALMMQLGAEGVFVGSGIFKSGDPVKRASAIVKAVTNFRNPQILAQISEDLGEAMVGINENEIQILMAERGK

SEQ ID NO: 13259 - protein, 345 aa, Streptococcus pneumoniae
MAKKIVALVGDGIGPEIMEAGLEVLEALAEKTGFDYEIDRRPFGGADIDAAGPPLPDETLKASREADAILLVAIGSPQYDGVAVRPEQGLMALRKELNLYANIRPVKIFDSLKYLSPLKPERISGVDFVVVRELTGEIYFGDHILEERKARDINDYSYEEVERIIRKAFEIARNRRKIVTSIDKQNVLATSKLWRKVAEEVAQDFPDVTLEHQLVDSAAMLMITNPAKFDVIVTENLFGDILSDESSVLSGTLGVMPSASHSENGPSLYEPIHGSAPDIAGQGIANPISMILSVVMMLRDSFGRYEDTERIKRAVETSLAAGILTRDIGGQASTKEMMEAIIARL

SEQ ID NO: 13260 - protein, 193 aa, Streptococcus pneumoniae
MKIGILALQGAFAEHAKVLDQLGVESVELRNLDDFQQDQSDLSGLILPGGESTTMGKLLRDQNMLLPIREAILSGLPVFGTCAGLILLAKEITSQKESHLGTMDMVVERNAYGRQLGSFYTEAECKGVGKIPMTFIRGPIISSVGEGVEILAIVNNQIVAAQEKNMLVSSFHPELTDDVRLHQYFINMCKEKS

SEQ ID NO: 13261 - protein, 328 aa, Streptococcus pneumoniae
MLNEFPIFDYEDIQLIPNKCVIKSRAEADTSVTLGNHTFKLPVVPANMQTILDENVAEQLAKGGYFYIMHRFDEAGRIPFIKRMHDQGLIASISVGVKDYEYDFVSQLKADAPEYITIDIAHGHADSVISMIQHIKKELPDTFVIAGNVGTPEAVRELENAGADATKVGIGPGKVCITKVKTGFGTGGWQLAALRWCAKAARKPIIADGGIRTHGDIAKSIRFGASMIMIGSLFAGHIESPGKTIEVDGEQFKEYYGSASQYQKGAYKNVEGKRILLPAKGHLQDTLTEMEQDLQSAISYAGGRQVADLKHVDYVIVKNSIWNGDASH

SEQ ID NO: 13262 - protein, 1179 aa, Streptococcus pneumoniae
MYLKEIEIQGFKSFADKTKVVFDQGVTAVVGPNGSGKSNITESLRWALGESSVKSLRGGKMPDVIFAGTESRKPLNYASVVVTLDNHDGFIKDAGQEIRVERHIYRSGDSEYKIDGKKVRLRDIHDLFLDTGLGRDSFSIISQGKVEEIFNSKPEERRAIFEEAAGVLKYKTRRKETESKLQQTQDNLDRLEDIIYELDNQIKPLEKQAENARKFLDLEGQRKVIYLDVLVAQIKENKAELESTEEELAQVQELLMSYYQKREKLEEENQTLKKQRQDLQAEMAKDQGSLMDLTSLISDLERKLALSKLESEQVALNQQEAQARLAALEDKRNSLSKEKYDKESSLALLEGNLVQNNQKLNRLEAELLAFSDDPDQMIELLRERFVALLQEEADVSNQLTRIENELENSRQLSQKQADQLEKLKEQLATAKEKASQQKDELETAKVQVQKLLADYQAIAKEQEEQKTSYQAQQSQLFDRLDSLKNKQARAQSLENILRNHSNFYAGVKSVLQEKDRLGGIIGAVSEHLTFDVYYQTALEIALGASSQHIIVEDEESATKAIDFLKRNRVGRATFLPLTTIKARTISSQNQDAIAVSPGFLGMADELVTFDTRLEAIFKNLLATTAIFDTVEHAREAARQVRYQVRMVTLDGTELRTGGSYAGGANRQNNSIFIKPELEQLQKEIAADEASLGSEEAALKTLQDQMAALTERLEAIKSQGEQARIQEQGLSLAYQQTSQQVEELETLWKLQEEEIDRLSEGDWQADKEKCQESLATIASEKQNLEAEIEEIKSNKNAIQERYQNLQEEVAQARLLKTELQGQKRYEVADIERLGKELDNLNIEQEEIQRMLQEKVDNLEKVDTELLSQQAEESKTQKTNLQQGLIRKQFELDDIEGQLDDIASHLDQARQQNEEWIRKQTRAEAKKEKVSERLRHLQNQLTDQYQISYTEALEKAHELENLNLAEQEVQDLEKAIRSLGPVNLEAIDQYEEVHNRLDFLNSQRDDILSAKNLLLETITEMNDEVKERFKSTFEAIRESFKVTFKQMFGGGQADLILTEGDLLTAGVEISVQPPGKKIQSLNLMSGGEKALSALALLFSIIRVKTIPFVILDEVEAALDEANVKRFGDYLNRFDKDSQFIVVTHRKGTMAAADSIYGVTMQESGVSKIVSVKLKDLESIEG

SEQ ID NO: 13263 - protein, 425 aa, Streptococcus pneumoniae
MGLFDRLFGKKEEPKIEEVVKEALENLDLSEDVDPTFTEVEEVSQEEAEVEIVEQAVFQEEEIQDTVEESLDLEPVVEVSQKEVEEFPHSEEGNTEFLETIEENNSEVLEPERPQAEETVQEKYDRSLKKTRTGFGARLNAFFANFRSVDEEFFEELEELLIMSDVGVQVASNLTEELRYEAKLENAKKPDALRRVIIEKLVELYEKDGSYDESIHFQDNLTVMLFVGVNGVGKTTSIGKLAHRYKQAGKKVMLVAADTFRAGAVAQLAEWGRRVDVPVVTGPEKADPASVVFDGMERAVAEGIDILMIDTAGRLQNKDNLMAELEKIGRIIKRVVPEAPHETFLALDASTGQNALVQAKEFSKITPLTGIVLTKIDGTARGGVVLAIREELNIPVKLIGFGEKIDDIGEFNSENFMKGLLEGLI

SEQ ID NO: 13264 - protein, 495 aa, Streptococcus pneumoniae
MSSKVIVTIFGASGDLAKRKLYPSLFRLYKSGNLSKHFAVIGTARRPWSKEYFESVVVESILDLADSTEQAQEFASHFYYQSHDVNDSEHYIALRQLQAELNEKYQAEHNKLFFLSMAPQFFGTIAKHLKSENIVDGKGFERLIVEKPFGTDYATANKLNDELLATFDEEQIFRIDHYLGKEMIQSIFAVRFANLIFENVWNKDFIDNVQITFAERLGVEERGGYYDQSGALRDMVQNHTLQLLSLLAMDKPASFTKDEIRAEKIKVFKNLYHPTDEELKEHFIRGQYRSGKIDGMKYISYRSEPNVNPESTTETFTSGAFFVDSDRFRGVPFFFRTGKRLTEKGTHVNIVFKQMDSIFGEPLAPNILTIYIQPTEGFSLSLNGKQVGEEFNLAPNSLDYRTDATATGASPEPYEKLIYDVLNNNSTNFSHWDEVCASWKLIDRIEKLWAENGAPLHDYKAGSMGPQASFDLLEKFGAKWTWQPDITYRQDGRLE

SEQ ID NO: 13265 - protein, 234 aa, Streptococcus pneumoniae
MKKILIVDDEKPISDIIKFNMTKEGYEVVTAFNGREALEQFEAEQPDIIILDLMLPEIDGLEVAKTIRKTSSVPILMLSAKDSEFDKVIGLELGADDYVTKPFSNRELQARVKALLRRSQPMPVDGQEADSKPQPIQIGDLEIVPDAYVAKKYGEELDLTHREFELLYHLASHTGQVITREHLLETVWGYDYFGDVRTVDVTVRRLREKIEDTPSRPEYILTRRGVGYYMRNNA

SEQ ID NO: 13266 - protein, 449 aa, Streptococcus pneumoniae
MLDLLKQTIFTRDFIFILILLGFILVVTLLLLENRRDNIQLKQINQKVKDLIAGDYSKVLDMQGGSEITNITNNLNDLSEVIRLTQENLEQESKRLNSILFYMTDGVLATNRRGQIIMINDTAKKQLGLVKEDVLNRSILELLKIEENYELRDLITQSPELLLDSQDINGEYLNLRVRFALIRRESGFISGLVAVLHDTTEQEKEERERRLFVSNVSHELRTPLTSVKSYLEALDEGALCETVAPDFIKVSLDETNRMMRMVTDLLHLSRIDNATSHLDVELINFTAFITFILNRFDKMKGQEKEKKYELVRDYPINSIWMEIDTDKMTQVVDNILNNAIKYSPDGGKITVRMKTTEDQMILSISDHGLGIPKQDLPRIFDRFYRVDRARSRAQGGTGLGLSIAKEIIKQHKGFIWAKSEYGKGSTFTIVLPYDKDAVKEEVWEDEVED

SEQ ID NO: 13267 - protein, 164 aa, Streptococcus pneumoniae
MEIRLAFPNEVDAIMQVMEEAKKCLADAGSDQWQNGYPNADVIIDDIISGQAYVALEEGELLAYAAVTKSPEEAYEAIYEGNWQAGESEYLVFHRIAVAADVQGKGVAQTFLEGLIEGFDYLDFRSDTHAENKVMQHIFEKLGFKQVGKVPVDGERLAYQKLKK

SEQ ID NO: 13268 - protein, 631 aa, Streptococcus pneumoniae
MKLVMDNPEVTTKDLMEVLPGPDFPTGALVMGKSGIHKAYETGKGSIVLRSRTEIETTKTGRERIVVTEFPYMVNKTKVHEHIVRLVQEKRIEGITAVRDESNREGVRFVIEVKRDASANVILNNLFKMTQMQTNFGFNMLAIQNGIPKILSLRQILDAYIEHQKEVVVRRTRFDKEKAEARAHILEGLLIALDHIDEVIRIIRASETDAEAQAELMSKFKLSERQSQAILDMRLRRLTGLERDKIQSEYDDLLALIADLADILAKPERVSQIIKDELDEVKRKFSDKRRTELMVGQVLSLEDEDLIEESDVLITLSNRGYIKRLDQDEFTAQKRGGRGVQGTGVKDDDFVRELVSTSTHDHLLFFTNKGRVYRLKGYEIPEYGRTAKGLPVVNLLKLDEDESIQTVINVESDRSDDAYLFFTTRHGIVKRTSVKEFANIRQNGLKALNLKDEDELINVLLAEGDMDIIIGTKFGYAVRFNQSAVRGMSRIATGVKGVNLREGDTVVGASLITDQDEVLIITEKGYGKRTVATEYPTKGRGGKGMQTAKITEKNGLLAGLMTVQGDEDLMIITDTGVMIRTNLANISQTGRATMGVKVMRLDQDAQIVTFTTVAVAEKEEVGTENETEGEA

SEQ ID NO: 13269 - protein, 247 aa, Streptococcus pneumoniae
MSQKNNKKKNKRKNLLTNILAGFLILLSLALIFNTQIRNIFIVWNTNKYQVSQVSKDKLEENQDTRSNFDFDSVKAISSEAVLTSQWDAHKLPVIGGIAIPELEMNLPIFKGLDNVNLFYGAGTMKREQVMGEGNYSLASHHIFGVDNANKMLFSPLDNAKNGMKIYLTDKNKVYTYEIREVKRVTPDRVDEVDDRDGVNEITLVTCEDLAATERIIVKGDLKETKDYSQTSDEILTAFNQPYKQFY

SEQ ID NO: 13270 - protein, 265 aa, Streptococcus pneumoniae
MVSSEFISKIEFACNKKDSLYSQSKFKYAIRSMFAGAFLTFSTAAGAVGADLINKIAPGSGRFLFPFVFAWGLAYIVFLNAELVTSNMMFLTAGSFLKKISWRKTAEILLYCTLFNLIGALIAGWGFAHSAAYANLTHDSFISGVVEMKLGRSNELVLLEAILANIFVNIAILSFILVKDGGAKLWLVLSAIYMFVFLTNEHIAANFASFAIVKFSVAADSIANFGVGNMLRHWGVTFIGNFIGGGLLMGLPYAFLNKNEDTYVD

SEQ ID NO: 13271 - protein, 176 aa, Streptococcus pneumoniae
MQKKYVKILYSSPIGILSLVADDHYLYGIWVQEQKHFERGLGDETIEEVVSHPILDPVIACLDDYFKGKPQDLSNLLLAPIGTNFEKRVWDYLQGIPYGQTVTYGQIAQDLQVASAQAIGGAVGRNPWSILVPCHRVLGAGKRLTGYAAGVEKKAWLLEHEGVDFKDRNNRRRSTC

SEQ ID NO: 13272 - protein, 448 aa, Streptococcus pneumoniae
MEMEKYLSVTTLTKYLKMKFDKDPYLERVYLTGQVSNFRKRPTHQYFSLKDDHAVIQATIWSGIYQKLGFDLEEGMKINVIGRVQVYEPSGSYSIIIEKVEPDGVGALAIQFEQLKKKLTEEGLFQERFKQALPQFSKRIGVVTSRSGAVIRDIITTVSRRFPGVDILLYPTKVQGEGAAEEIARNIARANQRDDLDLLIIGRGGGSIEDLWAFNEEIVVRAIFESRLPVISSVGHETDVTLADFVADRRAATPTAAAELATPVTKLDVLAHLQNQEKRMVTAVRNVLSKKQEALKKCSQSVIFRQPERLYDGYLQRLDQLQLRLKQSLRTRISDNKQLVQARTHQLVQLSPVTKIQRYQDRLGQLDKLLGSQMALVYDAKVAEAKRLSEALLMLDTSRIVARGYAIVKKEESVVDSVESLKKKDQVTLLMRDGQVELEVKDVKTKEI

SEQ ID NO: 13273 - protein, 291 aa, Streptococcus pneumoniae
MKKQEKLALVESALEDFYGDQQFASSLRESVLYSIHAGGKRIRPFLLLEVLEALQVAIKPAHAQVATALEMIHTGSLIHDDLPAMDDDDYRRGRLTNHKKFGEAMAILAGDALFLDPYALIAQADLPSQIKVDLIANLSLASGSLGMVAGQVLDMEGEHQHLSLEELQTIHANKTGKLLAYPFQAAAIIAELSPEMQVKLKTVGELIGLAFQVRDDVLDVTASFEEIGKTPQKDLQAEKSTYPALLGLEESIAFCNQTLDQANEKLEEIAQQVPFETESIVSVVESLRING

SEQ ID NO: 13274 - protein, 171 aa, Streptococcus pneumoniae
MRIAIGCDHIVTDEKMAVSEFLKSKGYEVIDFGTYDHTRTHYPIFGKKVGEAVTSGQADLGVCICGTGVGINNAVNKVPGVRSALVRDMTTALYAKEQLNANVIGFGGKITGELLMCDIIEAFIHAEYKPSEENKKLIAKIEHLESHNAQQTDANFFTEFLEKWDRGEYHD

SEQ ID NO: 13275 - protein, 105 aa, Streptococcus pneumoniae
MNREEVTLLGFEIVAYAGDARSKLLEALKAAEAGDFEKADALVEEAGSCIAEAHHAQTSLLTKEASGEDLAYSVTMMHGQDHLMTTILLKDLMHHLIELYKRGVK

SEQ ID NO: 13276 - protein, 563 aa, Streptococcus pneumoniae
MNKLIAFIEKGKPFFDKLSRNIYLRAIRDGFIAGMPVILFSSIFILIAFVPNSWGFKWSDEVVAFLMKPYSYSMGILALLVAGTTAKSLTDSVNRSMEKTNQINYMSTLLAAIVGLLMLAADPIENGLATGFLGTKGLLSAFLAAFVTVAIYKVCVKNNVTIRMPDEVPPNISQVFKDVIPFTLSVVSLYALDLLARHFVGSSVAESIGKFFAPLFSAADGYLGITIIFGAFAFFWFVGIHGPSIVEPAIAAITYANAEVNLNLLQQGMHADKILTSGTQMFIVTMGGTGATLVVPFMFMWLTKSKRNRAIGRASVVPTFFGVNEPILFGAPLVLNPIFFIPFIFAPIANVWIFKFFIETLGMNSFTANLPWTTPAPLGLVLGTNFQVLSFILAALLIVVDVVIYYPFLKVYDEQILEEERSGKSNDELKEKVAANFNTAKADAILEKAGVDAAQNTITEETNVLVLCAGGGTSGLLANALNKAAAEYNVPVKAAAGGYGAHREMLPEFDLVILAPQVASNFEDMKAETDKLGIKLAKTEGAQYIKLTRDGKGALAFVQAQFD

SEQ ID NO: 13277 - protein, 471 aa, Streptococcus pneumoniae
MKKMTKTLPKDFIFGGATAAYQAEGATHTDGKGPVAWDKYLEDNYWYTAEPASDFYNRYPVDLKLAEEYGVNGIRISIAWSRIFPTGYGQVNAKGVEFYHNLFAECHKRHVEPFVTLHHFDTPEALHSNGDFLNRENIEHFVDYAAFCFEEFPEVNYWTTFNEIGPIGDGQYLVGKFPPGIQYDLAKVFQSHHNMMVSHARAVKLYKDKGYKGEIGVVHALPTKYPLDHENPADVRAAELEDIIHNKFILDATYLGRYSAETMEGVNHILSVNGGSLDLREEDFTALEAAKDLNDFLGINYYMSDWMEAFDGETEIIHNGKGKKGSSKYQIKGVGRRVAPDYVPRTDWDWIIYPQGLYDQIMRVKKDYPNYKKIYITENGLGYKDEFVDNTVYDDGRIDYVKQHLEILSDAIADGANVKGYFIWSLMDVFSWSNGYEKRYGLFYVDFETQERYPKKSAHWYKKVAETQIID

SEQ ID NO: 13278 - protein, 320 aa, Streptococcus pneumoniae
METYYKAINWNAIEDVIDKSTWEKLTEQFWLDTRIPLSNDLDDWRKLSNKEKDLVGKVFGGLTLLDTMQSETGVQALRADIRTPHEEAVFNNIQFMESVHAKSYSSIFSTLNTKAEIEEIFEWTNTNPYLQKKAEIVNEIYLNGSPLEKKVASVFLETFLFYSGFFTPLYYLGNNKLANVAEIIKLIIRDESVHGTYIGYKFQLGFNELPEEEQEKLKEWMYDLLYTLYENEEGYTESLYDGVGWTEEVKTFLRYNANKALMNMGQDPLFPDSAEDVNPIVMNGISTGTSNHDFFSQVGNGYLLGEVEAMQDDDYNYGLD

SEQ ID NO: 13279 - protein, 719 aa, Streptococcus pneumoniae
MGLKHLEDVTYFRLNNEINRPVNGQIMLHKDKEALDAFFKENVVPNTMVFDSIKDKINYLIEHNYIETAFIKKYRPEFLEELAQFIKDQNFQFKSFMAAYKFYNQYALKTNDGEYYLENMEDRVFFNALYFADGNEAVAIDIANEIIHQRYQPATPSFLNAGRARRGELVSCFLIQVTDDMNSIGRSINSALQLSRIGGGVGITLSNLREAGAPIKGYEGAASGVVPVMKLFEDSFSYSNQLGQRQGAGVVYLNVFHPDIIAFLSTKKENADEKVRVKTLSLGVVVPDKFYELARKNEEMYLFSPYSVEKEYGVPFNYIDITEKYDELVANPNIRKTKIKARDLETEISKLQQESGYPYVVNIDTANRANPVDGKIIMSNLCSEILQVQEPSLINDAQEFLQMGTDVSCNLGSTNVVNMMTSPDFGRSIRAMVRALTFVTDSSHIVAVPTIDHGNSQAHTFGLGAMGLHSYLAQQLIEYGSPESVEFTSIYFMLMNYWTLVESNNIARERGITFHNFEKSDYANGSYFDKYVTGEFVPTSDRVKELFKNVFIPGVADWAELRDKVQEDGLYHQNRLAVAPNGSISYINDVSASIHPITQRIEERQEKKIGKIYYPAAGLSTETIPYYTSAYDMDMRKVIDVYAAATEHVDQGLSLTLFMRSDIPKGLYEWKRENKQTTRDLSILRNYAFNKGIKSIYYVRTFTDDGGEVGANQCESCVI

SEQ ID NO: 13280 - protein, 87 aa, Streptococcus pneumoniae
MASKDFHVVAETGIHARPATLLVQTASKFASDITLEYKGKSVNLKSIMGVMSLGVGQGADVTISAEGADADDAIAAISETMEKEGLA

SEQ ID NO: 13281 - protein, 577 aa, Streptococcus pneumoniae
MTEMLKGIAASDGVAVAKAYLLVQPDLSFETITVEDTNAEEARLDAALQASQDELSVIREKAVGTLGEEAAQVFDAHLMVLADPEMISQIKETIRAKKVNAEAGLKEVTDMFITIFEGMEDNPYMQERAADIRDVTKRVLANLLGKKLPNPASINEEVIVIAHDLTPSDTAQLDKNFVKAFVTNIGGRTSHSAIMARTLEIAAVLGTNNITEIVKDGDILAVNGITGEVIINPTDEQAAEFKAAGEAYAKQKAEWALLKDAQTVTADGKHFELAANIGTPKDVEGVNNNGAEAVGLYRTEFLYMDSQDFPTEDEQYEAYKAVLEGMNGKPVVVRTMDIGGDKELPYFDMPHEMNPFLGFRALRISISETGDAMFRTQIRALLRASVHGQLRIMFPMVALLKEFRAAKAVFDEEKANLLAEGVAVADNIQVGIMIEIPAAAMLADQFAKEVDFFSIGTNDLIQYTMAADRMNEQVSYLYQPYNPSILRLINNVIKAAHAEGKWAGMCGEMAGDQQAVPLLVGMGLDEFSMSATSVLRTRSLMKKLDTAKMEEYANRALTECSTMEEVLELQKEYVNFD

SEQ ID NO: 13282 - protein, 318 aa, Streptococcus pneumoniae
MDIRPQSSDELDSQRRVRRDMSNSLKGTLLTVVAGIAWGLSGTSGQYLMAHGISALVLTNLRLLIAGGILMLLAYATAKDKILVFLKDRKSLLSLLIFALIGLFLNQFAYLSAIQETNAGTATVLQYVCPVGILIYSCIKDRVAPTLGEIVSIIFAIGGTFLIATHGQLDQLSMTPAGLFWGLFSALTYALYIILPIALIKKWGSSLVIGVGMVIAGLVALPFTGVLQADIPTSLDFLLAFAGIILIGTVFAYTAFLKGASLIGPVKSSLLASIEPISAIFFAFLIMNEQFYPIDFLGMAMILFAVTLISLKDLFLEK

SEQ ID NO: 13283 - protein, 520 aa, Streptococcus pneumoniae
MSNISTDLQDVEKIIVLDYGSQYNQLISRRIREIGVFSELKSHKISAAEVREVNPVGIILSGGPNSVYEDGSFDIDPEIFELGIPILGICYGMQLLTHKLGGKVVPAGDAGNREYGQSTLTHTPSALFESTPDEQTVLMSHGDAVTEIPADFVRTGTSADCPYAAIENPDKHIYGIQFHPEVRHSVYGNDILRNFALNICKAKGDWSMDNFIDMQIKKIRETVGDKRVLLGLSGGVDSSVVGVLLQKAIGDQLICIFVDHGLLRKGEADQVMDMLGGKFGLNIVKADAAKRFLDKLAGVSDPEQKRKIIGNEFVYVFDDEASKLKDVKFLAQGTLYTDVIESGTDTAQTIKSHHNVGGLPEDMQFELIEPLNTLYKDEVRALGTELGMPDHIVWRQPFPGPGLAIRVMGEITEEKLETVRESDAILREEIAKAGLDRDIWQYFTVNTGVRSVGVMGDGRTYDYTIAIRAITSIDGMTADFAKIPWEVLQKISVRIVNEVDHVNRIVYDITSKPPATVEWE

SEQ ID NO: 13284 - protein, 428 aa, Streptococcus pneumoniae
MTKTLKRPEVLSPAGTLEKLKVAVQYGADAVFIGGQAYGLRSRAGNFTFEQMEEGVQFAAKYGAKVYVAANMVMHEGNEAGAGEWFRKLRDIGIAAVIVSDPALIMIAATEAPGLEIHLSTQASATNYETLEFWKELGLTRVVLAREVSMEELAEIRKRTDVEIEAFVHGAMCISYSGRCTLSNHMSMRDANRGGCSQSCRWKYDLYDMPFGKERKSLQGEIPEEFSMSAVDMSMIDHIPDMIENGVDSLKIEGRMKSIHYVSTVTNCYKAAVDAYLESPEKFEAIKQDLVDEMWKVAQRELATGFYYGIPSENEQLFGARRKIPEYKFVAEVVSYDDAVQTATIRQRNVINEGDQVEFYGPGFRHFETYIEDLHDAKGNKIDRAPNPMELLTIKVPQPVQSGDMVRALKEGLINFYKEDGTSVTVRA

SEQ ID NO: 13285 - protein, 486 aa, Streptococcus pneumoniae
MYPDDSLTLHTDLYQINMMQVYFDQGIHNKKAVFEVYFRQQPFKNGYAVFAGLERIVNYLEDLRFSDSDIAYLESLGYHGAFLDYLRNFKLELTVRSAQEGDLVFANEPIVQVEGPLAQCQLVETALLNIVNYQTLVATKAARIRSVIEDEPLMEFGTRRAQEMDAAIWGTRAAVIGGANGTSNVRAGKLFDIPVLGTHAHALVQVYGNDYEAFKAYAATHKNCVFLVDTYDTLRIGVPAAIQVARELGDQINFMGVRIDSGDIAYISKKVRQQLDEAGFTEAKIYASNDLDENTILNLKMQKAKIDVWGVGTKLITAYDQPALGAVYKIVAIEDETGQMRNTIKLSNNAEKVSTPGKKQVWRITSREKGKSEGDYITYDGVDISDMTEIKMFHPTYTYIKKTVRNFDAVPLLVDIFKEGILVYNLPSLTDIQDYARKEFDKLWDEYKRVLNPQHYPVDLARDVWQDKMDLIDKMRKEALGEGEEE

SEQ ID NO: 13286 - protein, 274 aa, Streptococcus pneumoniae
MSLQETIIQELGVKPVIDAQEEIRRSIDFLKRYLKKHPFLKTFVLGISGGQDSTLAGRLAQLAMEELRAETGDDSYKFIAVRLPYGVQADEADAQKALAFIQPDVSLVVNIKESADAMTAAVEATGSPVSDFNKGNIKARCRMIAQYALAGSHSGAVIGTDHAAENITGFFTKFGDGGADILPLYRLNKRQGKQLLQKLGAEPALYEKIPTADLEEDKPGLADEVALGVTYAEIDDYLEGKTISPEAQATIENWWHKGQHKRHLPITVFDDFWE

SEQ ID NO: 13287 - protein, 346 aa, Streptococcus pneumoniae
MNRYMNTADFDFHLPEELIAQTPLEKRDASKLLIVNRETGEMQDKHFHSIIDMLEPGDALVMNDTRVLPARLYGQKVETGSHVELLLLKNTSGDEWEVLAKPAKRLKVGTRISFGDGRLSAVVTEELTHGGRIVRFEYQRIFLEVLESLGEMPLPPYIHEKLDDRERYQTVYAKESGSAAAPTAGLHFTKELLAEIQAKGVHLVYLTLHVGLGTFRPVSVDNLDEHEMHSEFYQLSEEAAATLRSVKENGGRVIAVGTTSIRTLETIGSKFDGQIQADSGWTNIFIKPGYEWKVVDAFSTNFHLPKSTLVMLVSAFAGRELVLDAYHHSIQEHYRFFSFGDAMFIY

SEQ ID NO: 13288 - protein, 61 aa, Streptococcus pneumoniae
MKKMSKTVVRKNESLDDALRRFKRAVTKAGTLQETRKREFYEKPSVKRKRKSEVARKRKKF

SEQ ID NO: 13289 - protein, 315 aa, Streptococcus pneumoniae
  VARIANT (1)...(315): Xaa = Any Amino Acid
MMSVLVKEVIEKLRLDIVYGEPELLEKEINIADITRPGLEMTGYFDYYTPERIQLLGMKEWSYLISMPSNSRYEVLKKMFLPETPAVIVARGLVVPEEMLKAARECKIAILTSRAATSRLSGELSSYLDSRLAERTSVHGVLMDIYGMGVLIQGDSGIGKSETGLELVKRGHRLVADDRVDIFAKDEITLWGEPAEILKHLIEIRGVGIIDVMSLYGASAVKDSSQVQLAVYLENYDTHKTFDRLGNNAEELEVSGVAIPRIRIPVKTGRNISVVIEAAAMNYRAKEMGFDATRLFDERLTSLIARNEVRNAKXH

SEQ ID NO: 13290 - protein, 280 aa, Streptococcus pneumoniae
MNTYQLNNGVEIPVLGFGTFKAKDGEEAYRAVLEALKAGYRHIDTAAIYQNEESVGQAIKDSGVPREEMFVTTKLWNSQQTYEQTRQALEKSIEKLGLDYLDLYLIHWPNPKPLRENDAWKTRNAEVWRAMEDLYQEGKIRAIGVSNFLPHHLDALLETATIVPAVNQVRLAPGVYQDQVVAYCREKGILLEAWGPFGQGELFDRKQVQDIAANHGKSVAQIALAWSLAEGFLPLPKSVTTSRIQANLDCFGIELSHEERETLKTIAVQSGAPRVDDVDF

SEQ ID NO: 13291 - protein, 305 aa, Streptococcus pneumoniae
MNQEELAKKMLLPSKNSRLEKLGKGLTFACLSLIVILVAMILVFVAQKGLSTFFVNGVNIFDFLLGGTWNPSSKEFGALPMILGSFIVTILSALIATPFAIGAAVFMTEVSPKGAKILQPAIELLVGIPSVVYGFIGLQVVVPFVRSVFGGTGFGILSGISVLFVMILPTVTFMTTDSLRAVPRYYREASFAMGATRWQTIWRVILKAARSGIFTAVVFGMARAFGEALAIQMVVGNSAVIPTSLTTPAATLTSILTMGIGNTVMGTVNNNVLWSLALVLLLMSLVFNSVIKLITKERGKKNYAR

SEQ ID NO: 13292 - protein, 271 aa, Streptococcus pneumoniae
MKSKKWIFVLCNFLASFFLVACQSGSNGSQSAVEAIKQKGKLVVATSPDYAPFEFQSLVDGKNQVVGADIDMAQAIADELGVKLEISSMSFDNVLTSLQTGKADLAVAGISATDERKEVFDFSIPYYENKISFLVRKADVEKYKDLTSLESANIAAQKGTVPESMVKEQLPKAQLTSLTNMGEAVNELQAGKVDAVHMDEPVALSYAAKNAGLAVATVSLKMKDGDANAVALRKNSDDLKEVVDKVIQKLKNEGTYQSYLEKAASLTEVEE

SEQ ID NO: 13293 - protein, 243 aa, Streptococcus pneumoniae
MDKNVQEPVKLFQYNTLGALMAGLYGGTMTVGELLEHGDLGLGTLDSIDGELIVLDGKAYQAKGSGDQPEIVEVSPDALIPYAAVVPHQAEVIFRQRFEMTDKELKERIESYYDGENLFRSIKIRGEFSHMHVRMIPKSTPDTKFADVATHQPEYSRDNVAGTIVGFWTPEIFHGVSVAGYHLHFISDDLTFGGHVMDFVIKEGIIEVGAVDQLDQRFPVQDRQYLFAKFNVDEMKKDIEKAE

SEQ ID NO: 13294 - protein, 316 aa, Streptococcus pneumoniae
MSVREKMLEILEGIDIRFKEPLHRYSYTKVGGEADYLVFPRNRFELARVVKFANQENIPWMVLGNASNIIVRDGGIRGFVILCDKLNNVSVDGYTIEAEAGANLIETTRIALRHSLTGFEFACGIPGSVGGAVFMNAGAYGGEIAHILQSCKVLTKDGEIETLSAKDLAFGYRHSAIQESGAVVLSVKFALAPGTHQVIKQEMDRLTHLRELKQPLEYPSCGSVFKRPVGHFAGQLISEAGLKGYRIGGVEVSEKHAGFMINVADGTAKDYEDLIQSVIEKVKEHSGITLEREVRILGESLSVAKMYAGGFTPCKR

SEQ ID NO: 13295 - protein, 872 aa, Streptococcus pneumoniae
MKQLSSAQVRQMWLDFWATKGHSVEPSVSLVPVNDPTLLWINSGVATLKKYFDGTIIPENPRITNAQKAIRTNDIENVGKTARHHTMFEMLGNFSIGDYFRDEAITWAYELLTSPEWFDFPAEKLYMTYYPDDKDSYNRWIEVGVDPSHLIPIEDNFWEIGAGPSGPDTEIFFDRGEAFDPENIGLRLLAEDIENDRYIEIWNIVLSQFNADPAVPRSEYKELPHKNIDTGAGLERLVAVIQGAKTNFETDLFMPIIREVEKLSGKVYDQDGDNMSFKVIADHIRSLSFAIGDGALPGNEGRGYVLRRLLRRASMHGQKLGINEPFLYKLVPTVGKIMESYYPEVLEKRDFIEKIVKSEEESFARTLHSGQHFAQGIVADLKEKGQSVIAGQDVFKLYDTYGFPVELTEEIAEEAGMTVDREGFEAAMKEQQERARASAVKGGSMGMQNETLQNITVESVFNYNTSQLSSKLVAIVADNAEVGAVSEGTASLIFAETSFYAEMGGQVADYGQILDESGKIVATVTNVQKAPNGQALHTVEVLAPLALNQEYTLAIDSNRRHRVMKNHTATHLLHAALHNILGNHATQAGSLNEVEFLRFDFTHFQAVTAEELRAIEQQVNEKIWEALEVKTVETDIDTAKEMGAMALFGEKYGKEVRVVTIGDYSIELCGGTHVDNTSEIGLFKIVKEEGIGSGTRRILAVTGKEAFEAYREQEDALKAIAATLKAPQVKEVPHKVEGLQEQLRQLQKENAELKEKAAAAAAGDIFKDVKEVNGHRYIASQVSVSDDGALRTFADNWKQKDYSDLLVLVAAIGDKVNVLVASKTKDLHAGNLVKELAPIIDGRGGGKPDMAMAGGSNQPKIQELLDAVAGKL

SEQ ID NO: 13296 - protein, 249 aa, Streptococcus pneumoniae
MIEFQNVSKLYGDKEALSNLNLQIENGEIMGLIGHNGAGKSTTIKSLVSIISPSSGRILVNGQELSENRLAIKRKIGYVADSPDLFLRLTANEFWELIASSYDLTSSDLETSLARLLNVFDFAENRYQVIETLSHGMRQKVFVIGALLSDPDIWVLDEPLTGLDPQAAFDLKQMMKEHAQKGKTVLFSTHVLEVAEQVCDRIAILKKGHLIYCGSVEDLRKDYPDQSLESIYLSLAGRKEEVADASQGH

SEQ ID NO: 13297 - protein, 225 aa, Streptococcus pneumoniae
MKLIVSVMPRSLEEAQALDATRYLDADIIEWRADYLPKEAILQVAPAIFEKFAGRELVFTLRTRSEGGEIDLSPEEYIHLIKEVAQLYQPDYIDFEYYSYKDVFEEMLDFPNLVLSYHNFQETPENMMEILSELTILNPKLVKVAVMAHTEQDVLDLMNYTRGFKTLNPEQEYVTISMGKVGKVSRITADVTGSSWSFASLDEVSAPGQISLASMKKIREILDEA

SEQ ID NO: 13298 - protein, 284 aa, Streptococcus pneumoniae
MKLDGYTRLAAVVANPIKHSISPFIHNRAFEATATNGAYVAWEIEASDLVETVANIRRYQMFGINLSMPYKEQVIPYLDKLSDEARLIGAVNTVVNENGNLIGYNTDGKGFFKCLPSFTISGKKMTLLGAGGAAKSILAQAILDGVSQISVFVRSVSMEKTRPYLDKLQEQTGFKVDLCALEYVSELQARIAESDLLVNATSVGMDGQSSPVPENIVLPETLLVADIIYQPFETPFLKWARSQGNPAVNGLGMLLYQAAEAFQLWTGKEMPTEEIWQSLTEKYQ

SEQ ID NO: 13299 - protein, 388 aa, Streptococcus pneumoniae
MRYLTAGESHGPRLTAIIEGIPAGLPLTAEDINEDLRRRQGGYGRGGRMKIENDQVVFTSGVRHGKTTGAPITMDVINKDHQKWLDIMSAEDIEDRLKSKRKITHPRPGHADLVGGIKYRFDDLRNSLERSSARETTMRVAVGAVAKRLLAELDMEIANHVVVFGGKEIDVPENLTVAEIKQRAAQSEVSIVNQEREQEIKDYIDQIKRDGDTIGGVVETVVGGVPVGLGSYVQWDRKLDARLAQAVVSINAFKGVEFGLGFEAGYRKGSQVMDDILWSKEDGYTRRTNNLGGFEGGMTNGQPIVVRGVMKPIPTLYKPLMSVDIETHEPYKATVERSDPTALPAAGMVMEAVVATVLAQEILEKFSSDNLEELKEAVAKHRDYTKNY

SEQ ID NO: 13300 - protein, 424 aa, Streptococcus pneumoniae
MSKENPLSHHEQLRYDYLLKNIHYLNEREKNEFAYLQEKLTLARGNSSSSLEQEREEQVDLPSYANRSRSQSKSQALSFPPKKKRRKLRLKRIFMVIFSLLVCVALAMVFMFLRGYQDASAKKTADARAAQVEVFNGQDTRDGVNILIMGTDGRIGQNSVETRTDSIMVLNVGGSDKKMKLVSFMRDNLVYIDGYSQVINGRKQTDNKLNVAYELGEQEGQKGAEMVRQVLKDNFDLDIKYYALVDFQAFATAIDTLFPDGVTIDAQFSTLNGRPLTEATVGDDLYATETESPTQTIKVGKQQMNGSTLLNYARFRDDDEADYGRTKRQQQVLTAILEQIKDPTKLFTGSEALGKVFAMTSTNVPYTFLLTNGLSVLDGAKNGIEKLTIPELGDWVDAYDVYGGLGLLVDQNKYQTKLAQMGLR

SEQ ID NO: 13301 - protein, 195 aa, Streptococcus pneumoniae
MRACIFTSPLLVFSNKTKEVKTIAKQDLFINDEIRVREVRLIGLEGEQLGIKPLSEAQALADNANVDLVLIQPQAKPPVAKIMDYGKFKFEYQKKQKEQRKKQSVVTVKEVRLSPTIDKGDFDTKLRNARKFLEKGNKVKVSIRFKGRMITHKEIGAKVLAEFAEATQDIAIIEQRAKMDGRQMFMQLAPATDKK

SEQ ID NO: 13302 - protein, 66 aa, Streptococcus pneumoniae
MPKQKTHRASAKRFKRTGSGGLKRFRAYTSHRFHGKTKKQRRHLRKASMVHSGDYKRIKAMLTRLK

SEQ ID NO: 13303 - protein, 119 aa, Streptococcus pneumoniae
MARVKGGVVSRKRRKRILKLAKGYYGAKHILFRTAKEQVMNSYYYAYRDRRQKKRDFRKLWITRINAAARMNGLSYSQLMHGLKLAEIEVNRKMLADLAVNDAVAFTALADAAKAKLGK

SEQ ID NO: 13304 - protein, 560 aa, Streptococcus pneumoniae
MEYNHKERTMSFDGFFLHHIVEELRTKLVNGRIQKINQPFEQELVLQIRSNRQSHRLLLSAHPVFGRIQLTQTTFENPAQPSTFIMVLRKYLQGALIESIEQVENDRIVEMTVSNKNEIGDHIQATLIIEIMGKHSNILLVDKSSHKILEVIKHVGFSQNSYRTLLPGSTYIAPPSTESLNPFTIKDEKLFEILQTQELTAKNLQSLFQGLGRDTANELERILVSEKLSAFRNFFNQETKPCLTETSFSPVPFANQAGEPFANLSDLLDTYYKNKAERDRVKQQASELIRRVENELQKNRHKLKKQERELLATDNAEEFRQKGELLTTFLHQVPNDQDQVILDNYYTNQPIMIALDKALTPNQNAQRYFKRYQKLKEAVKYLTDLIEETKATILYLESVETVLNQAGLEEIAEIREELIQTGFIRRRQREKIQKRKKLEQYLASDGKTIIYVGRNNLQNEELTFKMARKEELWFHAKDIPGSHVVISGNLDPSDAVKTDAAELAAYFSQGRLSNLVQVDMIEVKKLNKPTGGKPGFVTYTGQKTLRVTPDSKKIASMKKS

SEQ ID NO: 13305 - protein, 299 aa, Streptococcus pneumoniae
MTFKSGFVAILGRPNVGKSTFLNHVMGQKIAIMSDKAQTTRNKIMGIYTTDKEQIVFIDTPGIHKPKTALGDFMVESAYSTLREVDTVLFMVPADEARGKGDDMIIERLKAAKVPVILVVNKIDKVHPDQLLSQIDDFRNQMDFKEIVPISALQGNNVSRLVDILSENLDEGFQYFPSDQITDHPERFLVSEMVREKVLHLTREEIPHSVAVVVDSMKRDEETDKVHIRATIMVERDSQKGIIIGKGGAMLKKIGSMARRDIELMLGDKVFLETWVKVKKNWRDKKLDLADFGYNEREY

SEQ ID NO: 13306 - protein, 206 aa, Streptococcus pneumoniae
MKLYFVRHGRTLWNQEGRFQGASGDSPLLPESIETLKRLGQYLKEIPFDQIYSSDLPRAVKSAEIIQSQLHTPCSLEIVPNLREWQLGKLEGLKIATLEAIYPQQIQAFRSNLAQFDTRMFGAESLYSTTQRTIQFIKSLKDSPAERILIVGHGANLTASLRTLLGYKEPLLRKDGGLANASLTIIETHDFETFTLNTWNDTSYQS

SEQ ID NO: 13307 - protein, 479 aa, Streptococcus pneumoniae
MRNDLKYGIIKGNFYRKEKIMSNFAIILAAGKGTRMKSDLPKVLHKVAGISMLEHVFRSVGAIQPEKTVTVVGHKAELVEEVLAEQTEFVTQSEQLGTGHAVMMTEPILEGLSGHTLVIAGDTPLITGESLKNLIDFHINHKNVATILTAETDNPFGYGRIVRNDNAEVLRIVEQKDATDFEKQIKEINTGTYVFDNERLFEALKNINTNNAQGEYYITDVIGIFRETGEKVGAYTLKDFDESLGVNDRVALATAESVMRRRINHKHMVNGVSFVNPEATYIDIDVEIAPEVQIEANVILKGQTKIGAETVLTNGTYVVDSTIGAGAVITNSMIEESSVADGVTVGPYAHIRPNSSLGAQVHIGNFVEVKGSSIGENTKAGHLTYIGNCEVGSNVNFGAGTITVNYDGKNKYKTVIGDNVFVGSNSTIIAPVELGDNSLVGAGSTITKDVPADAIAIGRGRQINKDEYATRLPHHPKNQ

SEQ ID NO: 13308 - protein, 322 aa, Streptococcus pneumoniae
MSTLDKNLLLEMFRKMEEIRRMDLKIAQLVKKGKVPGMTHFSVGEEAANVGAMLALNPDDLITSNHRGHGQAIAKGIDLNGMMAEILGKYTGTCKGKGGSMHIADLDAGNLGANGIVGGGMGIAVGAALSQQMQNTGKIVVCFFGDGATNEGVFHEAVNMASIWNLPVIFYCINNGYGISADIKKMTNIEHIHQRSAAYGIPGMFIEDGNNVIDVYEGFQKAVDHVRSGNGPVLIESVTYRWLGHSSSDPGKYRTREEVELWKQKDPIENLRNYLIENNIASAEELEKIQAQVKEAVEASVKFAEESPFPPLESAFEDIYTD

SEQ ID NO: 13309 - protein, 330 aa, Streptococcus pneumoniae
METKTMSFRDTIILAMSEEMRRDENVFLMGEDVGVFGGDFGTSVGMLEEFGPERVRDCPISEAAISGAAAGAAMTGLRPIVDMTFMDFSVIAMDNIVNQAAKTRYMFGGKGQVPMTVRCAAGNGVGSAAQHSQSLESWFTHIPGLKVVAPGTPADMKGLLKSSIRDNNPVIILEYKSEFNQKGEVPVDPDYTIPLGVGEIKRQGTDVTVVTYGKMLRRVVQAAEELAEEGISVEIVDPRTLVPLDKDIIINSVKKTGKVILVNDAHKTSGYIGEISAIISESEAFDYLDAPIRRCAGEDVPMPYAQNLENAMIPTVESIKDAIRKTYNKD

SEQ ID NO: 13310 - protein, 347 aa, Streptococcus pneumoniae
MADDKLRATPAARKLADDLGINLYDVSGSGANGRVHKEDVETYKDTNVVRISPLAKRIALEHNIAWQEIQGTGHRGKIMKKDVLALLPENIENDSIKSPAQIEKVEEVPDNVTPYGKIERIPMTPMRKVIAQRMVESYLTAPTFTLNYEVDMTEMLALRKKVLEPIMEATGKKTTVTDLLSLAVVKTLMKHPYINASLTEDGKTIITHNYVNLAMAVGMDNGLMTPVVYNAEKMSLSELVVAFKDVIGRTLDGKLAPSELQNSTFTISNLGMFGVQSFGPIINQPNSAILGVSSTIEKPVVVNGEIVIRPIMSLGLTIDHRVVDGMAGAKFMKDLKELIETPISMLI

SEQ ID NO: 13311 - protein, 283 aa, Streptococcus pneumoniae
MATIQWFPGHMSKARRQVQENLKFVDFVTILVDARLPLSSQNPMLTKIVGDKPKLLILNKADLADPAMTKEWRQYFESQGIQTLAINSKEQVTVKVVTDAAKKLMADKIARQKERGIQIETLRTMIIGIPNAGKSTLMNRLAGKKIAVVGNKPGVTKGQQWLKTNKDLEILDTPGILWPKFEDETVALKLALTGAIKDQLLPMDEVTIFGINYFKEHYPEKLAERFKQMKIEEEAPVIIIDMTRALGFRDDYDRFYSLFVKEVRDGKLGNYTLDTLEDLDGND

SEQ ID NO: 13312 - protein, 1216 aa, Streptococcus pneumoniae
MKLIPFLSEEEIQKLQEAEANSSKEQKKTAEQIEAIYTSAQNILVSASAGSGKTFVMAERILDQLARGVEISQLFISTFTVKAATELKERLEKKISKKIQETDDVDLKQHLGRQLADLPNAAIGTMDSFTQKFLGKHGYLLDIAPNFRILQNQSEQLILENEVFHEVFEAHYQGKQKETFSHLLKNFAGRGKDERGLRQQVYKIYDFLQSTSNPQKWLSESFLKGFEKADFTSEKEKLTEQIKQALWDLESFFRYHLDNDAKEFAKAAYLENVQLILDEIGSLNQESDSQAYQAVLARVVAISKEKNGRALTNASRKADLKPLADAYNEERKTQFAKLGQLSDQIAILDYQERYHGDTWKLAKTFQSFMSDFVEAYRQRKRQENAFEFADISHYTIEILENFPQVRESYQERFHEVMVDEYQDTNHIQERMLELLSNGHNRFMVGDIKQSIYRFRQADPQIFNEKFQRYAQNPQEGRLIILKENFRSSSEVLSATNDVFERLMDQEVGEINYDNKHQLVFANTKLTPNPDNKAAFLLYDKDDTGEEEESQTETKLTGEMRLVIKEILKLHQEKGVAFKEIALLTSSRSRNDQILLALSEYGIPVKTDGEQNNYLQSLEVQVMLDTLRVIHNPLQDYALVALMKSPMFGFDEDELARLSLQKAEDKVHENLYEKLVNAQKMASSQKGLIHTALAEKLKQFMDILASWRLYAKTHSLYDLIWKIYNDRFYYDYVGALPNGPARQANLYALALRADQFEKSNFKGLSRFIRMIDQVLEAQHDLASVAVAPPKDAVELMTIHKSKGLEFPYVFILNMDQDFNKQDSMSEVILSRQNGLGVKYIAKMETGAVEDHYPKTIKLSIPSLTYRQNEEELQLASYSEQMRLLYVAMTRAEKKLYLVGKGSREKLESKEYPAAKNGKLNSNTRLQARNFQDWLWAISKVFTKDKLNFSYRFIGEDQLTREAIGELETKSPLQDSSQADNRQSDTIKEALEMLKEVEVYNTLHRAAIELPSVQTPSQIKKFYEPVMDMEGVEIAGQGQSVGKKISFDLPDFSTKEKVTGAEIGSATHELMQRIDLSQQLTLASLTETLKQVQTSQAVRDKINLDKILAFFDTVLGQEILANTDHLYREQPFSMLKRDQKSQEDFVVRGILDGYLLYENKIVLFDYKTDRYDEPSQLVDRYRGQLALYEEALSRAYSIENIEKYLILLGKDEVQVVKV

SEQ ID NO: 13313 - protein, 434 aa, Streptococcus pneumoniae
MSIITDVYAREVLDSRGNPTLEVEVYTESGAFGRGMVPSGASTGEHEAVELRDGDKSRYGGLGTQKAVDNVNNIIAEAIIGYDVRDQQAIDRAMIALDGTPNKGKLGANAILGVSIAVARAAADYLEIPLYSYLGGFNTKVLPTPMMNIINGGSHSDAPIAFQEFMILPVGAPTFKEALRYGAEIFHALKKILKSRGLETAVGDEGGFAPRFEGTEDGVETILAAIEAAGYVPGKDVFLGFDCASSEFYDKERKVYDYTKFEGEGAAVRTSAEQIDYLEELVNKYPIITIEDGMDENDWDGWKALTERLGKKVQLVGDDFFVTNTDYLARGIQEGAANSILIKVNQIGTLTETFEAIEMAKEAGYTAVVSHRSGETEDSTIADIAVATNAGQIKTGSLSRTDRIAKYNQLLRIEDQLGEVAEYRGLKSFYNLKK

SEQ ID NO: 13314 - protein, 375 aa, Streptococcus pneumoniae
MRENMKIVIAPDSFKESLTAQQVAEAIKRGFQQSIADVECLLCPVGDGGEGTVDAIRHSLDLKEKWIQVTDPSGQKEAMRYFQKGELALFEVADLVGLGKIPLEKRNPLQIQTCGIGELILHLISKGIKDIYIEIGGTASNDGGLGIAAGLGYQFYDRDGNVLPASGQSLLNLASVSTENCYKIPEGVQIHILADVVSPLCGHQGATYTFGNQKGLHPTMFAVVDQAIQDFYEKFSPATLEIKGAGAGGGLAGGLCAFAQASIVSGIDTCLDLINFDKKVSDADLVVVGEGRLDSQSFAGKAPIGVAKRTPVGVPVIAICGSLAEDLPPLPFENIQAVFSILEKSEPLEDSLKNASLYLERTAANIGHLLNMCKI

SEQ ID NO: 13315 - protein, 551 aa, Streptococcus pneumoniae
MYQALYRKYRSQNFSQLVGQEVVAKTLKQAVEQEKISHAYLFSGPRGTGKTSVAKIFAKAMNCPNQVGGEPCNNCYICQAVTDGSLEDVIEMDAASNNGVDEIREIRDKSTYAPSLARYKVYIIDEVHMLSTGAFNALLKTLEEPTQNVVFILATTELHKIPATILSRVQRFEFKSIKTQDIKEHIHYILEKENISSEPEAVEIIARRAEGGMRDALSILDQALSLTQGNELTTAISEEITGTISLPALDDYVAALSQQDVPKALSCLNLLFDNGKSMTRFVTDLLHYLRDLLIVQTGGENTHHSSVFVENLALPQKNLFEMIRLATVSLADIKSSLQPKIYAEMMTVRLAEIKSEPALSGAVENEIATLRQEVARLKQELSNVGAVPKQVAPAPSRPATGKTVYRVDRNKVQSILQEAVENPDLARQNLIRLQNAWGEVIESLGGPDKALLAGSQPVAANEHHAILAFESNFNAGQTMKRDNLNTMFGNILSQAAGFSPEILAISMEEWKEVRAAFSAKAKSSQTEKEVEESLIPEGFEFLADKVKVEED

SEQ ID NO: 13316 - protein, 439 aa, Streptococcus pneumoniae
MTQTEADEAMQAARAALPAWRALSAIERAAYLHKTAAILERDKEKIGTILAKEVAKGIKAAIGEVVRTADLIRYAAEEGLRITGQAMEGGGFEAASKNKLAVVRREPVGIVLAIAPFNYPVNLSASKIAPALIAGNVVMLKPPTQGSISGLLLAKAFEEAGIPAGVFNTITGRGSEIGDYIIEHKEVNFINFTGSTPIGERIGRLAGMRPIMLELGGKDAALVLEDADLEHAAKQIVAGAFSYSGQRCTAIKRVIVLESVADKLATLLQEEVSKLTVGDPFDNADITPVIDNASADFIWGLIEDAQEKEAQALTPIKREGNLLWPVLFDQVTKDMKVAWEEPFGPVLPIIRVASVEEAIAFANESEFGLQSSVFTNDFKKAFEIAEKLEVGTVHINNKTQRGPDNFPFLGVKGSGAGVQGIKYSIEAMTNVKSIVFDVK

SEQ ID NO: 13317 - protein, 652 aa, Streptococcus pneumoniae
MNKRMNELVALLNRYATEYYTSDNPSVSDSEYDRLYRELVELETAYPEQVLADSPTHRVGGKVLDGFEKYSHQYPLYSLQDAFSREELDAFDARVRKEVAHPTYICELKIDGLSISLTYEKGILVAGVTRGDGSIGENITENLKRVKDIPLTLPEELDITVRGECYMPRASFDQVNQARQENGEPEFANPRNAAAGTLRQLDTAVVAKRNLATFLYQEASPSTRDSQEKGLKYLEQLGFVVNPKRILAENIDEIWNFIQEVGQERENLPYDIDGVVIKVNDLASQEELGFTVKAPKWAVAYKFPAEEKEAQLLSVDWTVGRTGVVTPTANLTPVQLAGTTVSRATLHNVDYIAEKDIRKDDTVIVYKAGDIIPAVLRVVESKRVSEEKLDIPTNCPSCNSDLLHFEDEVALRCINPRCPAQIMEGLIHFASRDAMNITGLGPSIVEKLFAANLVKDVADIYRLQEEDFLLLEGVKEKSAAKLYQAIQASKENSAEKLLFGLGIRHVGSKASQLLLQYFHSIENLYQADSEEVASIESLGGVIAKSLQTYFAAEGSEILLRELKETGVNLDYKGQTVVADAALSGLTVVLTGKLERLKRSEAKSKLESLGAKVTGSVSKKTDLVVVGADAGSKLQKAQELGIQVRDEAWLESL

SEQ ID NO: 13318 - protein, 633 aa, Streptococcus pneumoniae
MIILQANKIERSFAGEVLFDNINLQVDERDRIALVGKNGAGKSTLLKILVGEEEPTSGEINKKKDISLSYLAQDSRFESENTIYDEMLHVFNDLRRTERQLRQMELEMGEKSGEDLDKLMSDYDRLSENFRQAGGFTYEADIRAILNGFKFDESMWQMKIAELSGGQNTRLALAKMLLEKPNLLVLDEPTNHLDIETIAWLENYLVNYSGALIIVSHDRYFLDKVATITLDLTKHSLDRYVGNYSRFVELKEQKLVTEAKNYEKQQKEIAALEDFVNRNLVRASTTKRAQSRRKQLEKMERLDKPEAGKKSANMTFQSEKTSGNVVLTVENAAVGYDGEVLSQPINLDLRKMNAVAIVGPNGIGKSTFIKSIVDQIPFIKGEKRFGANVEVGYYDQTQSKLTPSNTVLDELWNDFKLTPEVEIRNRLGAFLFSGDDVKKSVGMLSGGEKARLLLAKLSMENNNFLILDEPTNHLDIDSKEVLENALIDFDGTLLFVSHDRYFINRVATHVLELSENGSTLYLGDYDYYVEKKATAEMSQTEEASTSNQAKEASPVNDYQAQKESQKEVRKLMRQIESLEAEIEELESQSQAISEQMLETNDADKLMELQAELDKISHRQEEAMLEWEELSEQV

SEQ ID NO: 13319 - protein, 91 aa, Streptococcus pneumoniae
MANKQDLIAKVAEATELTKKDSAAAVEAVFAAVADYLAAGEKVQLIGFGNFEVRERAERKGRNPQTGKEMTIAASKVPAFKAGKALKDAVK

SEQ ID NO: 13320 - protein, 97 aa, Streptococcus pneumoniae
MLKMTLNNLQLFAHKKGGGSTSNGRDSQAKRLGAKAADGQTVTGGSILYRQRGTHIYPGVNVGRGGDDTLFAKVEGVVRFERKGRDKKQVSVYPIAK

SEQ ID NO: 13321 - protein, 114 aa, Streptococcus pneumoniae
MIQAVFERAEDGELRSAEITGHAESGEYGLDVVCASVSTLAINFINSIEKFAGYEPILELNEDEGGYLMVEIPKDLPSHQREMTQLFFESFFLGMANLSENSSEFVQTRVITEN

SEQ ID NO: 13322 - protein, 129 aa, Streptococcus pneumoniae
MVRPTMLGESSQKIGEIHKNHRRCIMSTYAIIKTGGKQVKVEVGQAVYVEKLNVEAGQEVTFNEVVLVGGENTVVGTPLVAGATVVGTVEKQGKQKKVVTYKYKPKKGSHRKQGHRQPYTKVVINAINA

SEQ ID NO: 13323 - protein, 99 aa, Streptococcus pneumoniae
MMNMQNMMRQAQKLQKQMEQSQAELAAMQFVGKSAQDLVQATLTGDKKVVSIDFNPAVVDPEDLETLSDMTVQAINSALEQIDETTKKKLGAFAGKLPF

SEQ ID NO: 13324 - protein, 324 aa, Streptococcus pneumoniae
MEVFESLKANLVGKNARIVLPEGEEPRILQATKRLVKETEVIPVLLGNPEKIKIYLEIEGIMDGYEVIDPQHYPQFEEMVSALVERRKGKMTEEDVRKVLVEDVNYFGVMLVYLGLVDGMVSGAIHSTASTVRPALQIIKTRPNVTRTSGAFLMVRGTERYLFGDCAININPDAEALAEIAINSAITAKMFGIEPKIAMLSYSTKGSGFGESVDKVVEATKIAHDLRPDLEIDGELQFDAAFVPETAALKAPGSTVAGQANVFIFPGIEAGNIGYKMAERLGGFAAVGPVLQGLNKPVNDLSRGCNADDVYKLTLITAAQAVHQ

SEQ ID NO: 13325 - protein, 298 aa, Streptococcus pneumoniae
MRFEFIADEHVKVKTFLKKHEVSKGLLAKIKFRGGAILVNNQPQNATYLLDVGDYVTIDIPAEKGFETLEAIELPLDILYEDDHFLVLNKPYGVASIPSVNHSNTIANFIKGYYVKQNYENQQVHIVTRLDRDTSGLMLFAKHGYAHARLDKQLQKKSIEKRYFALVKGDGHLEPEGEIIAPIARDEDSIITRRVAKGGKYAHTSYKIVASYGNIHLVYIHLHTGRTHQIRVHFSHIGFPLLGDDLYGGSLEDGIQRQALHCHYLSFYHPFLEQDLQLESPLPDDFSNLITQLSTNTL

SEQ ID NO: 13326 - protein, 256 aa, Streptococcus pneumoniae
MSVLEIKDLHVEIEGKEILKGVNLTLKTGEIAAIMGPNGTGKSTLSAAIMGNPNYEVTKGEVLFDGVNILELEVDERARMGLFLAMQYPSEIPGITNAEFLRAAMNAGKEDDEKISVREFITKLDEKMELLNMKEEMAERYLNEGFSGGEKKRNEILQLLMLEPTFALLDEIDSGLDIDALKVVSKGVNAMRGEGFGAMIITHYQRLLNYITPDVVHVMMEGRVVLSGGPELAARLEREGYAKLAEELGYDYKEEL

SEQ ID NO: 13327 - protein, 276 aa, Streptococcus pneumoniae
MTIQMKNTGKRIDLIANRKPQSQRVLYELRDRLKRNQFILNDTNPDIVISIGGDGMLLSAFHKYENQLDKVRFIGLHTGHLGFYTDYRDFELDKLVTNLQLDTGARVSYPVLNVKVFLENGEVKIFRALNEASIRRSDRTMVADIVINGVPFERFRGDGLTVSTPTGSTAYNKSLGGAVLHPTIEALQLTEIASLNNRVYRTLGSSIIVPKKDKIELIPTRNDYHTISVDNSVYSFRNIERIEYQIDHHKIHFVATPSHTSFWNRVKDAFIGEVDE

SEQ ID NO: 13328 - protein, 223 aa, Streptococcus pneumoniae
MTLEWEEFLDPYIQAVGELKIKLRGIRKQYRKQNKHSPIEFVTGRVKPIESIKEKMARRGITYATLEHDLQDIAGLRVMVQFVDDVKEVVDILHKRQDMRIIQERDYITHRKASGYRSYHVVVEYTVDTINGAKTILAEIQIRTLAMNFWATIEHSLNYKYQGDFPDEIKKRLEITARIAHQLDEEMGEIRDDIQEAQALFDPLSRKLNDGVGNSDDTDEEYR

SEQ ID NO: 13329 - protein, 213 aa, Streptococcus pneumoniae
MITIVLLILAYLLGSIPSGLWIGQVFFQINLREHGSGNTGTTNTFRILGKKAGMATFVIDFFKGTLATLLPIIFHLQGVSPLIFGLLAVIGHTFPIFAGFKGGKAVATSAGVIFGFAPIFCLYLAIIFFGALYLGSMISLSSVTASIAAVIGVLLFPLFGFILSNYDSLFIAIILALASLIIIRHKDNIARIKNKTENLVPWGLNLTHQDPKK

SEQ ID NO: 13330 - protein, 419 aa, Streptococcus pneumoniae
MRKIVINGGLPLQGEITISGAKNSVVALIPAIILADDVVTLDCVPDISDVASLVEIMELMGATVKRYDDVLEIDPRGVQNIPMPYGKINSLRASYYFYGSLLGRFGEATVGLPGGCDLGPRPIDLHLKAFEAMGATASYEGDNMKLSAKDTGLHGASIYMDTVSVGATINTMIAAVKANGRTIIENAAREPEIIDVATLLNNMGAHIRGAGTNIIIIDGVERLHGTRHQVIPDRIEAGTYISLAAAVGKGIRINNVLYEHLEGFVAKLEEMGVRMTVSEDSIFVEEQSNLKAINIKTAPYPGFATDLQQPLTPLLLRANGRGTIVDTIYEKRVNHVFELAKMDADISTTNGHILYTGGRDLRGASVKATDLRAGAALVIAGLMAEGKTEITNIEFILRGYSDIIEKLRNLGADIRLVED

SEQ ID NO: 13331 - protein, 436 aa, Streptococcus pneumoniae
MSMFLDTAKIKVKAGNGGDGMVAFRREKYVPNGGPWGGDGGRGGNVVFVVDEGLRTLMDFRYNRHFKADSGEKGMTKGMHGRGAEDLRVRVPQGTTVRDAETGKVLTDLIEHGQEFIVAHGGRGGRGNIRFATPKNPAPEISENGEPGQERELQLELKILADVGLVGFPSVGKSTLLSVITSAKPKIGAYHFTTIVPNLGMVRTQSGESFAVADLPGLIEGASQGVGLGTQFLRHIERTRVILHIIDMSASEGRDPYEDYLAINKELESYNLRLMERPQIIVTNKMDMPESQENLEEFKKKLAENYDEFEELPAIFPISGLTKQGLATLLDATAELLDKTPEFLLYDESDMEEEVYYGFDEEEKAFEISRDDDATWVLSGEKLMKLFNMTNFDRDESVMKFARQLRGMGVDEALRARGAKDGDLVRIGKFEFEFVD

SEQ ID NO: 13332 - protein, 374 aa, Streptococcus pneumoniae
MRKFPLFSSSLSFLLLILFKENDIIVVMEKKKLRINMLSSSEKVAGQGVSGAYRELVRLLHRAAKDQLIVTENLPIEADVTHFHTIDFPYYLSTFQKKRSGRKIGYVHFLPATLEGSLKIPFFLKGIVKRYVFSFYNRMEHLVVVNPMFIEDLVAAGIPREKVTYIPNFVNKEKWHPLPQEEVVRLRTDLGLSDNQFIVVGAGQVQKRKGIDDFIRLAEELPQITFIWAGGFSFGGMTDGYEHYKTIMENPPKNLIFPGIVSPERMRELYALADLFLLPSYNELFPMTILEAASCEAPIMLRDLDLYKVILEGNYRATAGREEMKEAILEYQANPAVLKDLKEKAKNISREYSEEHLLQIWLDFYEKQAALGRK

SEQ ID NO: 13333 - protein, 409 aa, Streptococcus pneumoniae
MKISKRHLLNYSILIPYLLLSILGLIVVYSTTSAILIEEGKSALQLVRNQGIFWIVSLILIALIYKLRLDFLRNERLIILVILIEMLLLFLARFIGISVNGAYGWISVAGVTIQPAEYLKIIIIWYLAHRFSKQQEEIATYDFQVLTQNQWLPRAFNDWRFVLLVLIGSLGIFPDLGNATILVLVSLIMYTVSGIAYRWFSTILALVSAASVFVLTTISLIGVETFSKIPVFGYVAKRFSAFFNPFADRADAGHQLANSYFAMVNGGWFGLGLGNSIEKRGYLPEAHTDFVFSIVIEEFGFVGASLILALLFFMILRIILVGIRAENPFNAMVALGVGGMMLVQVFVNIGGISGLIPSTGVTFPFLSQGGNSLLVLSVAVAFVLNIDASEKRAKLYRELENQPMNLLLK

SEQ ID NO: 13334 - protein, 294 aa, Streptococcus pneumoniae
MKKAMVIINPTSGGEKALDYKEKLENKAKEYFEYVETKITEKVLDATHFAEEASREQYDAVVVFGGDGTVNEVISGIDERDYIPKLGIIPGGTGNLITKLLEINQDIDGAIDELDFDLTNKIDIGKANDNYFGYIFSIGSLPEAIHNVEIEDKTKFGILTYAVNTMKSVMTDQVFNIKVETENGNYVGEASHVLVLLTNYFADKKIFEENKDGYANILILKDASIFSKLSVIPDLLKGDVVANDNIEYIKARNIKISSDSELESDVDGDKSDNLPVEIKVLAQRVEVFSKPKED

SEQ ID NO: 13335 - protein, 418 aa, Streptococcus pneumoniae
MIFDKDDFKAYDADLWNAIAKEEERQQNNIELIASENVVSKAVMAAQGSILTNKYAEGYPGRRYYGGTDVVDVVETLAIERAKEIFGAKFANVQPHSGSQANCAAYMSLIEPGDTVMGMDLAAGGHLTHGAPVSFSGQTYNFLSYSVDPETELLDFDAILKQAQEVKPKLIVAGASAYSQIIDFSKFREIADAVGAKLMVDMAHIAGLVAAGLHPSPVPYAHITTTTTHKTLRGPRGGLILTNDEELAKKINSAIFPGIQGGPLEHVVAAKAVSFKEVLDPAFKEYAANVIKNSKAMADVFLQDPDFRIISGGTENHLFLVDVTKVVENGKVAQNLLDEVNITLNKNSIPYETLSPFKTSGIRIGAAAITARGFGEEESRKVAELIIKTLKNSENEAVLEEVRSAVKELTDAFPLYED

SEQ ID NO: 13336 - protein, 359 aa, Streptococcus pneumoniae
MNIYDQLQAVEDRYEELGELLSDPDVVSDTKRFMELSKEEASNRDTVIAYREYKQVLQNIVDAEEMIKESGGDADLEEMAKQELKDAKAEKEEYEEKLKILLLPKDPNDDKNIILEIRGAAGGDEAALFAGDLLTMYQKYAEAQGWRFEVMEASMNGVGGFKEVVAMVSGQSVYSKLKYESGAHRVQRVPVTESQGRVHTSTATVLVMPEVEEVEYDIDPKDLRVDIYHASGAGGQNVNKVATAVRIVHLPTNIKVEMQEERTQQKNREKAMKIIRARVADHFAQIAQDEQDAERKSTIGTGDRSERIRTYNFPQNRVTDHRIGLTLQKLDTILSGKLDEVVDALVLYDQTQKLEELNK

SEQ ID NO: 13337 - protein, 199 aa, Streptococcus pneumoniae
MAQLYYRYGTMNSGKTIEILKVAYNYEEQGKGVVIMTSALDTRDGVGYVSSRIGMKRPALAIEETTDIFGYIRDLPEKPYCVLVDEAQFLKRHHVYDLARVVDELDIPVMAFGLKNDFRNELFEGSKYLLLLADKIDEIKTICQYCKKKATMVLRTQDGLPVYDGEQIQIGGNETYISVCRKHYFAPMITSNKEQNYDN

SEQ ID NO: 13338 - protein, 457 aa, Streptococcus pneumoniae
MITREFDTIAAISTPLGEGAIGIVRLSGTDSFAIAQKIFKGKDLNKVASHTLNYGHIIDPLTGKVMDEVMVGAMKSPKTFTREDIIEINTHGGIAVTNEILQLAIREGARLAEPGEFTKRAFLNGRVDLTQAEAVMDIIRAKTDKAMNIAVKQLDGSLSDLINNTRQEILNTLAQVEVNIDYPEYDDVEEATTAVVREKTMEFEQLLTKLLRTARRGKILREGISTAIIGRPNVGKSSLLNNLLREDKAIVTDIAGTTRDVIEEYVNINGVPLKLIDTAGIRETDDIVEQIGVERSKKALKEADLVLLVLNASEPLTAQDRQLLEISQDTNRIILLNKTDLPETIETSKLPEDVIRISVLKNQNIDKIEERINNLFFENAGLVEQDATYLSNARHISLIEKAVESLQAVNQGLELGMPVDLLQVDLTRTWEILGEITGDATPDELITQLFSQFCLGK

SEQ ID NO: 13339 - protein, 406 aa, Streptococcus pneumoniae
MTYPNLLDRFLTYVKVNTRSDEHSTTTPSTQSQVDFATNVLIPEMKRVGLQNVYYLPNGFAIGTLPANDPSLTRKIGFISHMDTADFNAEGVNPQVIENYDGCVIELGNSGFKLDPADFKSLEKYPGQTLITTDGTTLLGADDKSGIAEIMTAIEYLTAHPEIKHCEIRVGFGPDEEIGVGANKFDAEDFDVDFAYTVDGGPLGELQYETFSAAGAELHFQGRNVHPGTAKGQMVNALQLAIDFHNQLPENDRPELTEGYQGFYHLMDVTGSVEEARASYIIRDFEKDAFEARKASMQSIADKMNEELGSNRVTLNLTDQYYNMKEVIEKDMTPITIAKAVMEDLGITPIIEPIRGGTDGSKISFMGIPTPNIFAGGENMHGRFEYVSLQTMERAVDTIIGIVRSL

SEQ ID NO: 13340 - protein, 303 aa, Streptococcus pneumoniae
MIYTVTLNPSIDYIVRLDQVKVGSVNRMDSDDKFAGGKGINVSRVLKRLNIPNTATGFIGGFTGKFITDTLAEEEIETRFVQVAEDTRINVKIKADQETEINGTGPTVEPVQLEELKAILSSLTAEDTVVFAGSSAKNLGNVIYKDLISLTRQTGAQVVCDFEGQTLIDSLDYQPLLVKPNNHELGAIFGVKLESLDEIEKYARELLAKGAQNVIISMAGDGALLVTSEGAYFAKPIKGTVKNSVGAGDSMVAGFTGEFVKSKDAVEAFKWGVACGTATTFSDDLATAEFIKETYGKVEVEKR

SEQ ID NO: 13341 - protein, 650 aa, Streptococcus pneumoniae
MKIQDLLRKDVMLLDLQATEKTAVIDEMIKNLTEHGYVTDFETFKEGILAREALTSTGLGDGIAMPHSKNAAVKEATVLFAKSNKGVDYESLDGQATDLFFMIAAPEGANDTHLAALAELSQYLMKDGFADKLRQATSADQVIELFDQASEKTEELVQAPANDSGDFIVAVTACTTGIAHTYMAQEALQKVAAEMGVGIKVETNGASGVGNQLTAEDIRKAKAIIIAADKAVEMDRFDGKPLINRPVADGIRKTEELINLALSGDTEVYRAANGAKAATASNEKQSLGGALYKHLMSGVSQMLPFVIGGGIMIALAFLIDGALGVPNENLGNLGSYHELASMFMKIGGAAFGLMLPVFAGYVAYSIAEKPGLVAGFVAGAIAKEGFAFGKIPYAAGGEATSTLAGVSSGFLGALVGGFIAGALVLAIKKYVKVPRSLEGAKSILLLPLLGTILTGFVMLAVNIPMAAINTAMNDFLGGLGGGSAVLLGIVLGGMMAVDMGGPVNKAAYVFGTGTLAATVSSGGSVAMAAVMAGGMVPPLAIFVATLLFKDKFTKEERNSGLTNIIMGLSFITEGAIPFGAADPARAIPSFILGSAVAGGLVGLTGIKLMAPHGGIFVIALTSNALLYLVSVLVGAIVSGVVYGYLRKPQA

SEQ ID NO: 13342 - protein, 647 aa, Streptococcus pneumoniae
MSKKEININNYNDDAIQVLEGLDAVRKRPGMYIGSTDGAGLHHLVWEIVDNAVDEALSGFGDRIDVTINKDGSLTVQDHGRGMPTGMHAMGIPTVEVIFTILHAGGKFGQGGYKTSGGLHGVGSSVVNALSSWLEVEITRDGAVYKQRFENGGKPVTTLKKIGTALKSKTGTKVTFMPDATIFSTTDFKYNTISERLNESAFLLKNVTLSLTDKRTDEAIEFHYENGVQNFVSYLNEDKEILTPVLYFEGEDNGFQVEVALQYNDGFSDNILSFVNNVRTKDGGTHETGLKSAITKVMNDYARKTGLLKEKDKNLEGSDYREGLAAVLSILVPEEHLQFEGQTKDKLGSPLARPVVDGIVADKLTFFLMENGELASNLIRKAIKARDAREAARKARDESRNGKKNKKDKGLLSGKLTPAQSKNPAKNELYLVEGDSAGGSAKQGRDRKFQAILPLRGKVINTAKAKMADILKNEEINTMIYTIGAGVGADFSIEDANYDKIIIMTDADTDGAHIQTLLLTFFYRYMRPLVEAGHVYIALPPLYKMSKGKGKKEEVAYAWTDGELEELRKQFGKGATLQRYKGLGEMNADQLWETTMNPETRTLIRVTIEDLARAERRVNVLMGDKVEPRRKWIEDNVKFTLEEATVF

SEQ ID NO: 13343 - protein, 767 aa, Streptococcus pneumoniae
MANKNTSTTRRRPSKAELERKEAIQRMLISLGIAILLIFAAFKLGAAGITLYNLIRLLVGSLAYLAIFGLLIYLFFFKWIRKQEGLLSGFFTIFAGLLLIFEAYLVWKYGLDKSVLKGTMAQVVTDLTGFRTTSFAGGGLIGVALYIPTAFLFSNIGTYFIGSILILVGSLLVSPWSVYDIAEFFSRGFAKWWEGHERRKEERFVKQEEKARQKAEKEARLEQEETEKALLDLPPVDMETGEILTEEAVQNLPPIPEEKWVEPEIILPQAELKFPEQEDDSDDEDVQVDFSAKEALEYKLPSLQLFAPDKPKDQSKEKKIVRENIKILEATFASFGIKVTVERAEIGPSVTKYEVKPAVGVRVNRISNLSDDLALALAAKDVRIEAPIPGKSLIGIEVPNSDIATVSFRELWEQSQTKAENFLEIPLGKAVNGTARAFDLSKMPHLLVAGSTGSGKSVAVNGIIASILMKARPDQVKFMMVDPKMVELSVYNDIPHLLIPVVTNPRKASKALQKVVDEMENRYELFAKVGVRNIAGFNAKVEEFNSQSEYKQIPLPFIVVIVDELADLMMVASKEVEDAIIRLGQKARAAGIHMILATQRPSVDVISGLIKANVPSRVAFAVSSGTDSRTILDENGAEKLLGRGDMLFKPIDENHPVRLQGSFISDDDVERIVNFIKTQADADYDESFDPGEVSENEGEFSDGDAGGDPLFEEAKSLVIETQKASASMIQRRLSVGFNRATRLMEELEIAGVIGPAEGTKPRKVLQQ

SEQ ID NO: 13344 - protein, 497 aa, Streptococcus pneumoniae
MITGELKNKIDQLWEILWTEGNANPLTNIEQLTYLLFMKDLDSVELGRESDAEFLGIPYEGVFPKDKPEYRWSTFKNIGDAQEVYRLMTQEIFPFIKNLKGDTDDTAFSRYMREAIFQINKPATLQKAISILDVFPTRGLDVDFDNDKQSITDIGDIYEYLLSKLSTAGKNGQFRTPRHIIDMMVELMQPTIKDIISDPAMGSAGFLVSASRYLKRKKDEWETNTDNINHFHNQMFHGNDTDTTMLRLGAMNMMLHGVENPQISYLDSLSQDNEEADKYTLVLANPPFKGSLDYNSTSNDLLATVKTKKTELLFLSLFLRTLKPGGRAAVIVPDGVLFGSSKAHKGIRQEIVENHKLDAVISMPSGVFKPYAGVSTAILIFTKTGNGGTDKVWFYDMKADGLSLDDKRQPISDNDIPDIIERFHHLEKEAERQRTDQSFFVPVAEIKENDYDLSINKYKEIEYEKVEYEPTEVILKKINDLEKEIQAGLAELEKLLK

SEQ ID NO: 13345 - protein, 1042 aa, Streptococcus pneumoniae
MRRIEEKCKLIAQLDTKTVYSFMESVISIEKYVRAAKEYGYTHLAMMDIDNLYGAFDFLEITKKYGIHPLLGLEMTVFVDDQEVNLRFLALSSVGYQQLMKLSTAKMQGEKTWSVLSQYLEDIAVIVPYFDRVESLELGCDYYIGVYPETLASEFHHPILPLYRVNAFESRDREVLQVLTAIKENLPLREVPLRSRQDVFISASSLEKLFQECFPQALDNLEKLISGISYDLDTSLKLPRFNPARPAVEELRERAELGLVQKGLTSKEYQDRLDQELSVIHDMGFDDYFLVVWDLLRFGRSNGYYMGMGRGSAVGSLVSYALDITGIDPVEKNLIFERFLNRERYTMPDIDIDIPDIYRPDFIRYVGNKYGSKHAAQIVTFSTFGAKQALRDVLKRFGVPEYELSAITKKISFRDNLKSAYEGNLQFRQQINSKLEYQKAFEIACKIEGYPRQTSVHAAGVVISDQDLTNYIPLKYGDEIPLTQYDAHGVEASGLLKMDFLGLRNLTFVQKMQELLAEIEGIHLKIEEIDLEDKETLALFASGNTKGIFQFEQPGAIRLLKRVQPVCFEDVVATTSLNRPGASDYINNFVARKHGQEEVTVLDPVLEDILAPTYGIMLYQEQVMQVAQRFAGFSLGKADILRRAMGKKDASAMHEMRASFIQGSLEAGHTVEKAEQVFDVMEKFAGYGFNRSHAYAYSALAFQLAYFKTHYPAIFYQVMLNSSNSDYLIDALEAGFEVASLSINTIPYHDKIANKAIYLGLKSIKGVSNDLALWIIENRPYSNIEDFIAKLPENYLKLPLLEPLVKVGLFDSFEKNRQKVFNNLANLFEFVKELGSLFGDAIYSWQESEDWTEQEKFYMEQELLGIGVSKHPLQAIASKAIYPITPIGNLSENSYAIILVEVQKIKVIRTKKGENMAFLQADDSKKKLDVTLFSDLYRQVGQEIKEGAFYYVKRKIQSRDGRLQMIAQEIREAVAERFWIQVKNHESDQEISRILEQFKGPIPVIIRYEEEQKTIVSPHHFVAKSNELEEKLNEIVMKTIYR

SEQ ID NO: 13346 - protein, 335 aa, Streptococcus pneumoniae
MKRIAVLTSGGDAPGMNAAIRAVVRQAISEGMEVFGIYDGYAGMVAGEIHPLDAASVGDIISRGGTFLHSARYPEFAQLEGQLKGIEQLKKHGIEGVVVIGGDGSYHGAMRLTEHGFPAIGLPGTIDNDIVGTDFTIGFDTAVTTAMDAIDKIRDTSSSHRRTFVIEVMGRNAGDIALWAGIATGADEIIIPEAGFKMEDIVASIKAGYECGKKHNIIVLAEGVMSAAEFGQKLKEAGDISDLRVTELGHIQRGGSPTPRDRVLASRMGAHAVKLLKEGIGGVAVGIRNEKMVENPILGTAEEGALFSLTAEGKIVVNNPHEADIELSSLNKSLS

SEQ ID NO: 13347 - protein, 501 aa, Streptococcus pneumoniae
MNKRVKIVATLGPAVEIRGGKKFGEDGYWGEKLDVEASAKNIAKLIEAGANTFRFNFSHGDHQEQGERMATVKLAEKIAGKKVGFLLDTKGPEIRTELFEGEAKEYSYKTGEKIRVATKQGIKSTREVIALNVAGALDIYDDVEVGRQVLVDDGKLGLRVVAKDDATREFEVEVENDGIIAKQKGVNIPNTKIPFPALAERDNDDIRFGLEQGINFIAISFVRTAKDVNEVRAICEETGNGHVQLFAKIENQQGIDNLDEIIEAADGIMIARGDMGIEVPFEMVPVYQKMIIKKVNAAGKVVITATNMLETMTEKPRATRSEVSDVFNAVIDGTDATMLSGESANGKYPLESVTTMATIDKNAQALLNEYGRLDSDSFERNSKTEVMASAVKDATSSMDIKLVVTLTKTGHTARLISKYRPNADILALTFDELTERGLMLNWGVIPMLTDAPSSTDDMFEIAERKAVEAGLVESGDDIVIVAGVPVGEAVRTNTMRIRTVR

SEQ ID NO: 13348 - protein, 823 aa, Streptococcus pneumoniae
MSNIQNMSLEDIMGERFGRYSKYIIQDRALPDIRDGLKPVQRRILYSMNKDSNTFDKSYRKSAKSVGNIMGNFHPHGDSSIYDAMVRMSQNWKNREILVEMHGNNGSMDGDPPAAMRYTEARLSEIAGYLLQDIEKKTVPFAWNFDDTEKEPTVLPAAFPNLLVNGSTGISAGYATDIPPHNLAEVIDAAVYMIDHPTAKIDKLMEFLPGPDFPTGAIIQGRDEIKKAYETGKGRVVVRSKTEIEKLKGGKEQIVITEIPYEINKANLVKKIDDVRVNNKVAGIAEVRDESDRDGLRIAIELKKDANTELVLNYLFKYTDLQINYNFNMVAIDNFTPRQVGIVPILSSYIAHRREVILARSRFDKEKAEKRLRIVEGLIRVISILDEVIALIRASENKRDAKENLKVSYDFTEEQAEAIVTLQLYRLTNTDVVVLQEEEAELREKIAMLAAIIGDERTMYNLMKKELREVKKNFATPRLSSLEDTAKAIEIDTASLIAEEDTYVSVTKAGYIKRTSPRSFAASTLEEIGKRDDDRLIFVQSAKTTQHLLMFTSLGNVIYRPIHELADIRWKDIGEHLSQTITNFETNEAILYVEVLDQFDDATTYFAATRLGQIKRVERKEFTPWRTYRSKSVKYAKLKDDTDQIVAVAPIKLDDVVLVSQNGYALRFNIEEVPVVGAKAAGVKAMNLKEDDVLQSGFICNTSSFYLLTQRGSLKRVSIEEILATSRAKRGLQVLRELKNKPHRVFLAGAVAEQGFVGDFFSTEVDVNDQTLLVQSNKGTIYESRLQDLNLSERTSNGSFISDTISDEEVFDAYLQEVVTEDK

SEQ ID NO: 13349 - protein, 709 aa, Streptococcus pneumoniae
MDKKYEKISQDLGVTLKQIDTVLSLTAEGATIPFIARYRKDMTGSLDEVAIKAIIDLDKSLTNLNDRKEAVLAKIQEQGKLTKELEEAILVAEKLADVEELYLPYKEKRRTKATIAREAGLFPLARLILQNIVDLEKEAEKFVCEGFATGKEALTGAVDILVEALSEDVTLRSMTYQEVLRHSKLTSQAKDESLDEKQVFQIYYDFSETVGTMQGYRTLALNRGEKLGVLKIGFEHATDRILAFFATRFKVKNAYIDEVVQQSVKKKVLPAIERRIRTELTEKAEEGAIQLFSDNLRNLLLVAPLKGRVVLGFDPAFRTGAKLAVVDATGKMLTTQVIYPVKPASARQIEEAKKDLADLIGQYGVEIIAIGNGTASRESEAFVAEVLKDFPEVSYVIVNESGASVYSASELARQEFPDLTVEKRSAISIARRLQDPLAELVKIDPKSIGVGQYQHDVSQKKLSESLDFVVDTVVNQVGVNVNTASPALLSHVAGLNKTISENIVKYREEEGKITSRAQIKKVPRLGAKAFEQAAGFLRIPESSNILDNTGVHPENYTAVKELFKRLDIKDLNEEAQSKLKSLSVKEMAQELDLGPETLKDIIADLLKPGRDFRDSFDAPVLRQDVLDIKDLVVGQKLEGVVRNVVDFGAFVDIGIHEDGLIHISHMSRKFIKHPSQVVSVGDLVTVWVKKIDTEREKVNLSLLAPNETD

SEQ ID NO: 13350 - protein, 271 aa, Streptococcus pneumoniae
MHYDASYISFDGILRKEILMTLLDVKHVQKIYKTRFQGNQVEALKDIHFTVEKGDYVAIMGESGSGKSTLLNILAMLDKPSRGQVYLNGTDTATIKNSQASSFRREKLGFVFQDFNLLDTLSVKDNILLPLVLSRRPITEMMKKLVVTAENLGINQLQEKYPYEISGGQKQRVAVARAIITEPEILLADEPTGALDSKSSAALLDVFDEINERGQTILMVTHSTAAASRAKRVLFIKDGILYNQIYRGEKTERQMFQEISDTLTVMASEVN

SEQ ID NO: 13351 - protein, 295 aa, Streptococcus pneumoniae
MEIKIETGGLRLDKALSDLSELSRSLANEQIKSGQVLVNGQVKKAKYTVQEGDVVTYHVPEPEVLEYVAEDLPLEIVYQDEDVAVVNKPQGMVVHPSAGHTSGTLVNALMYHIKDLSGINGVLRPGIVHRIDKDTSGLLMIAKNDDAHLVLAQELKDKKSLRKYWAIVHGNLPNDRGVIEAPIGRSEKDRKKQAVTAKGKPAVTRFHVLERFGDYSLVELQLETGRTHQIRVHMAYIGHPVAGDEVYGPRKTLKGHGQFLHAKTLGFTHPRTGKTLEFKADIPEIFKETLERLRK

SEQ ID NO: 13352 - protein, 212 aa, Streptococcus pneumoniae
MSKGFLVSLEGPEGAGKTSVLEALLPILEEKGVEVLTTREPGGVLIGEKIREVILDPSHTQMDAKTELLLYIASRRQHLVEKVLPALEAGKLVIMDRFIDSSVAYQGFGRGLDIEAIDWLNQFATDGLKPDLTLYFDIEVEEGLARIAANSDREVNRLDLEGLDLHKKVRQGYLSLLDKEGNRIVKIDASLPLEQVVETTNAVLFDGMGLAK

SEQ ID NO: 13353 - protein, 296 aa, Streptococcus pneumoniae
MKQDQLKAWQPAQFDRFVRILEQDQLNHAYLFSGFFGSLEMAQFLAKSLFCTDKVGVLPCEKCRSCKLIEQEEFPDVTLIKPVNQVIKTERIRELVGQFSQAGIESQQQVFIIEQADKMHPNAANSLLKVIEEPQSEVYIFFLTSDEEKMLPTIRSRTQIFHFKKQEEKLILLLEQMGLVKKKATLLAKFSQSRAEAEKLAHQASFWTLVDESERLLTWLVAKKKESYLQVAKLANLADDKEKQDQVLRILEVLCGQDLLQVRVRVILQDLLEARKMWQANVSFQNAMEYLVLKEI

SEQ ID NO: 13354 - protein, 444 aa, Streptococcus pneumoniae
MSQSYINVIGAGLAGSEAAYQIAERGIPVKLYEMRGVKSTPQHKTDNFAELVCSNSLRGDALTNAVGLLKEEMRRLGSVILESAEATRVPAGGALAVDRDGFSQMVTEKVANHPLIEVVRDEITELPTDVITVIATGPLTSDALAEKIHALNDGDGFYFYDAAAPIIDVNTIDMSKVYLKSRYDKGEAAYLNAPMTKQEFMDFHEALVNAEEAPLNSFEKEKYFEGCMPIEVMAKRGIKTMLYGPMKPVGLEYPDDYTGPRDGEFKTPYAVVQLRQDNAAGSLYNIVGFQTHLKWGEQKRVFQMIPGLENAEFVRYGVMHRNSYMDSPNLLEQTYRSKKQPNLFFAGQMTGVEGYVESAASGLVAGINAARLFKEESEVIFPETTAIGSLAHYITHADSKHFQPMNVNFGIIKELEGERIRDKKARYEKIAERALADLEEFLTV

SEQ ID NO: 13355 - protein, 185 aa, Streptococcus pneumoniae
MANVIIEKAKERMTQSHQSLAREFGGIRAGRANASLLDRVHVEYYGVETPLNQIASITIPEARVLLVTPFDKSSLKDIDRALNASDLGITPANDGSVIRLVIPALTEETRRDLAKEVKKVGENAKVAVRNIRRDAMDEAKKQEKAKEITEDELKTLEKDIQKVTDDAVKHIDDMTANKEKELLEV

SEQ ID NO: 13356 - protein, 148 aa, Streptococcus pneumoniae
MNKTTFMAKPGQVERKWYVVDATDVPLGRLSAVVASVLRGKNKPTFTPHTDTGDFVIVINAEKVKLTGKKATDKIYYTHSNHPGGLKQISAGELRSKNAVRLIEKSVKGMLPHNTLGRAQGMKLKVFVGAEHTHAAQQPEVLDISGLI

SEQ ID NO: 13357 - protein, 324 aa, Streptococcus pneumoniae
MAFAKISQVAHYVPEQVVTNHDLAQIMDTNDEWISSRTGIRQRHISRTESTSDLATEVAKKLMAKAGITGEELDFIILATITPDSMMPSTAARVQANIGANKAFAFDLTAACSGFVFALSTAEKFIASGRFQKGLVIGSETLSKAVDWSDRSTAVLFGDGAGGVLLEASEQEHFLAESLNSDGSRSECLTYGHSGLHSPFSDQESADSFLKMDGRTVFDFAIRDVAKSIKQTIDESPIEVTDLDYLLLHQANDRILDKMARKIGVDRAKLPANMMEYGNTSAASIPILLSECVEQGLIPLDGSQTVLLSGFGGGLTWGTLILTI

SEQ ID NO: 13358 - protein, 74 aa, Streptococcus pneumoniae
MAVFEKVQEIIVEELGKDASEVTLESTFDDLDADSLDLFQVISEIEDAFDIQIEAENDLKTVGDLVAYVEEQAK

SEQ ID NO: 13359 - protein, 324 aa, Streptococcus pneumoniae
MKTRITELLKIDYPIFQGGMAWVADGDLAGAVSKAGGLGIIGGGNAPKEVVKANIDKIKSLTDKPFGVNIMLLSPFVEDIVDLVIEEGVKVVTTGAGNPSKYMERFHEAGIIVIPVVPSVALAKRMEKIGADAVIAEGMEAGGHIGKLTTMTLVRQVATAVSIPVIAAGGIADGEGAAAGFMLGAEAVQVGTRFVVAKESNAHPNYKEKILKARDIDTTISAQHFGHAVRAIKNQLTRDFELAEKDAFKQEDPDLEIFEQMGAGALAKAVVHGDVEGGSVMAGQIAGLVSKEETAEEILKDLYYGAAKKIQEEASRWTGVVRND

SEQ ID NO: 13360 - protein, 243 aa, Streptococcus pneumoniae
MKLEHKNIFITGSSRGIGLAIAHKFAQAGANIVLNSRGAISEELLAEFSNYGIKVVPISGDVSDFADAKRMIDQAIAELGSVDVLVNNAGITQDTLMLKMTEADFEKVLKVNLTGAFNMTQSVLKPMMKAREGAIINMSSVVGLMGNIGQANYAASKAGLIGFTKSVAREVASRNIRVNVIAPGMIESDMTAILSDKIKEATLAQIPMKEFGQAEQVADLTVFLAGQDYLTGQVIAIDGGLSM

SEQ ID NO: 13361 - protein, 130 aa, Streptococcus pneumoniae
MSQAQYAGTGRRKNAVARVRLVPGTGKITVNKKDVEEYIPHADLRLVINQPFAVTSTVGSYDVFVNVVGGGYAGQSGAIRHGIARALLQVDPDFRDSLKRAGLLTRDSRKVERKKPGLKKARKASQFSKR

SEQ ID NO: 13362 - protein, 414 aa, Streptococcus pneumoniae
MKRMKLNRVVVTGYGVTSPIGNTPEEFWNSLATGKIGIGGITKFDHSDFDVHNAAEIQDFPFDKYFVKKDTNRFDNYSLYALYAAQEAVNHANLDVEALNRDRFGVIVASGIGGIKEIEDQVLRLHEKGPKRVKPMTLPKALPNMASGNVAMRFGANGVCKSINTACSSSNDAIGDAFRSIKFGFQDVMLVGGTEASITPFAIAGFQALTALSTTEDPTRASIPFDKDRNGFVMGEGSGMLVLESLEHAEKRGATILAEVVGYGNTCDAYHMTSPHPEGQGAIKAIKLALEEAEISPEQVAYVNAHGTSTPANEKGESGAIVAVLGKEVPVSSTKSFTGHLLGAAGAVEAIVTIEAMRHNFVPMTAGTSEVSDYIEANVVYGQGLEKEIPYAISNTFGFGGHNAVLAFKRWENR

SEQ ID NO: 13363 - protein, 161 aa, Streptococcus pneumoniae
MNLNDIKDLMTQFDQSSLREFSYKNGTDELQFSKNEARPVPEVATQVAPAPVLATPSPVAPTSAPAETVAEEVPAPAEASVATEGNLVESPLVGVVYLAAGPDKPAFVTVGDSVKKGQTLVIIEAMKVMNEIPAPKDGVVTEILVSNEEMVEFGKGLVRIK

SEQ ID NO: 13364 - protein, 455 aa, Streptococcus pneumoniae
MFRKILIANRGEIAVRIIRAARELGIATVAVYSTADKEALHTLLADEAVCIGPGKATESYLNINAVLSAAVLTEAEAIHPGFGFLSENSKFATMCEEVGIKFIGPSGHVMDMMGDKINARAQMIKAGVPVIPGSDGEVHNSEEALIVAEKIGYPVMLKASAGGGGKGIRKVEKPDDLVSAFETASSEAKANYGNGAMYIERVIYPARHIEVQILGDEHGHVIHLGERDCSLQRNNQKVLEESPSIAIGKTLRHEIGAAAVRAAEFVGYENAGTIEFLLDEASRNFYFMEMNTRVQVEHPVTEFVSGVDIVKEQICIAAGQPLSVKQEDIVLRGHAIECRINAENPAFNFAPSPGKITNLYLPSGGVGLRVDSAVYPGYTIPPYYDSMIAKIIVHGENRFDALMKMQRALYELEIEGVQTNADFQLDLISDRNVIAGDYDTSFLMETFLPKYQEKE

SEQ ID NO: 13365 - protein, 288 aa, Streptococcus pneumoniae
MALFSKKDKYIRINPNRSVREKPQAKPEVPDELFSQCPGCKHTIYQKDLGSERICPHCSYTFRISAQERLALTIDMGTFKELFTGIESKDPLHFPGYQKKLASMREKTGLHEAVVTGTALIKGQTVALGIMDSNFIMASMGTVVGEKITRLFEYATVEKLPVVLFTASGGARMQEGIMSLMQMAKISAAVKRHSNAGLFYLTILTDPTTGGVTASFAMEGDIILAEPQSLVGFAGRRVIENTVRESLPEDFQKAEFLLEHGFVDAIVKRRDLPDTIASLVRLHGGSPR

SEQ ID NO: 13366 - protein, 255 aa, Streptococcus pneumoniae
MNIAKIVREAREQSRLTTLDFATGIFDEFIQLHGDRSFRDDGAVVGGIGWLGDQAVTVVGIQKGKSLQDNLKRNFGQPHPEGYRKALRLMKQAEKFGRPVVTFINTAGAYPGVGAEERGQGEAIARNLMEMSDLKVPIIAIIIGEGGSGGALALAVADRVWMLENSIYAILSPEGFASILWKDGTRAMEAAELMKITSHELLEMDVVDKVISEVGLSSKELIKSVKKELQTELARLSQKPLEELLEERYQRFRKY

SEQ ID NO: 13367 - protein, 480 aa, Streptococcus pneumoniae
MNFETVIGLEVHVELNTNSKIFSPTSAHFGNDQNANTNVIDWSFPGVLPVLNKGVVDAGIKAALALNMDIHKKMHFDRKNYFYPDNPKAYQISQFDEPIGYNGWIEVELEDGTTKKIGIERAHLEEDAGKNTHGTDGYSYVDLNRQGVPLIEIVSEADMRSPEEAYAYLTALKEVIQYAGISDVKMEEGSMRVDANISLRPYGQEKFGTKTELKNLNSFSNVRKGLEYEVQRQAEILRSGGQIRQETRRYDEANKATILMRVKEGAADYRYFPEPDLPLFEISDEWIEEMRTELPEFPKERRARYVSDLGLSDYDASQLTANKVTSDFFEKAVALGGDAKQVSNWLQGEVAQFLNAEGKTLEQIELTPENLVEMIAIIEDGTISSKIAKKVFVHLAKNGGGAREYVEKAGMVQISDPAILIPIIHQVFADNEAAVADFKSGKRNADKAFTGFLMKATKGQANPQVALKLLAQELAKLKEN

SEQ ID NO: 13368 - protein, 488 aa, Streptococcus pneumoniae
MTFNNKTIEELHNLLVSKEISATELTQATLENIKSREEALNSFVTIAEEQALVQAKAIDEAGIDADNVLSGIPLAVKDNISTDGILTTAASKMLYNYEPIFDATAVANAKTKGMIVVGKTNMDEFAMGGSGETSHYGATKNAWDHSKVPGGSSSGSAAAVASGQVRLSLGSDTGGSIRQPAAFNGIVGLKPTYGTVSRFGLIAFGSSLDQIGPFAPTVKENALLLNAIASEDAKDSTSAPVRIADFTSKIGQDIKGMKIALPKEYLGEGIDPEVKETILNAAKHFEKLGAIVEEVSLPHSKYGVAVYYIIASSEASSNLQRFDGIRYGYRAEDATNLDEIYVNSRSQGFGEEVKRRIMLGTFSLSSGYYDAYYKKAGQVRTLIIQDFEKVFADYDLILGPTAPSVAYDLDSLNHDPVAMYLADLLTIPVNLAGLPGISIPAGFSQGLPVGLQLIGPKHSEETIYQVAAAFEATTGYHKQQPVIFGGDN

SEQ ID NO: 13369 - protein, 100 aa, Streptococcus pneumoniae
MKITQEEVTHVANLSKLRFSEEETAAFATTLSKIVDMVELLGEVDTTGVAPTTTMADRKTVLRPDVAEEGTDRDRLFKNVPEQDNYYIKVPAILDDGGDA

SEQ ID NO: 13370 - protein, 478 aa, Streptococcus pneumoniae
MTTFKDGFLWGGAVAAHQLEGGWQEGGKGISVADVMTAGRHGVAREITLGVLEGKYYPNHEAIDFYHRYKEDIALFAEMGFKCFRTSIAWTRIFPKGDELEPNEEGLQFYDNLFDECLKNGIEPVITLSHFEMPYHLVTEYGGWKNRKLIDFFARFAEVVFKRYKDKVKYWMTFNEINNQANYQEDFAPFTNSGIVYEEGDNREAIMYQAAHYELVASARAVKIGHEINPDFQIGCMIAMCPIYPVTCNPKDILMAMKAMQKRYYFADVHVLGKYPEHIFKYWERKGISVDFTDQDKEDLLGGTVDYIGFSYYMSFAIDSHRENNPYFDYLETEDLVKNNYVKASEWEWQIDPEGLRYALNWFTDHYHLPLFIVENGFGAIDQVAADGMVHDDYRIEYLGAHIREMKKAVVEDGVDLMGYTPWGCIDLVSAGTGEMRKRYGFIYVDKDDNGKGSYNRSPKKSFGWYKEVISSNGESVE

SEQ ID NO: 13371 - protein, 566 aa, Streptococcus pneumoniae
MEKISLESPKTGSDLVLETLRDLGVDTIFGYPGGAVLPFYDAIYNFKGIRHILGRHEQGCLHEAEGYAKSTGKLGVAVVTSGPGATNAITGIADAMSDSVPLLVFTGQVARAGIGKDAFQEADIVGITMPITKYNYQVRETADIPRIITEAVHIATTGRPGPVVIDLPKDISALETDFIYSSEVNLPSYQPTLEPNDMQIKKILKQLSKAKKPVLLAGGGISYAEAATELNEFAERYQIPVVTSLLGQGTIATSHPLFLGMGGMHGSFAANIAMTEADFMISIGSRFDDRLTGNPKTFAKNAKVAHIDIDPAEIGKIISADIPVVGDAKKALQMLLAEPTVHNNTEKWIEKVTKDKNRVRSYDKKERVVQPQAVIERIGELTNGDAIVVTDVGQHQMWTAQYYPYQNERQLVTSDGLGTMGFGIPAAIGAKIANPDKEVVLFVGDGGFQMTNQELAILNIYKVPIKVVMLNNHSLGMVRQWQESFYEGRTSESVFDTLPDFQLMAQAYGIKNYKFDNPETLAQDLEVITEDVPMLIEVDISRKEQVLPMVPAGKSNHEMLGVQFHA

SEQ ID NO: 13372 - protein, 166 aa, Streptococcus pneumoniae
MRCWGCSSMRRMLTAKLQNRSGVLNRFTGVLSRRQVNIESISVGATEDPNVSRITIIIDVASHDEVEQIIKQLNRQIDVIRIRDITDKPHLEREVILVKMSAPAEKRAEILAIIQPFRATVVDVAPSSITIQMTGNAEKSEALLRVIRPYGIRNIARTGATGFTRD

SEQ ID NO: 13373 - protein, 340 aa, Streptococcus pneumoniae
MTVQMEYEKDVKVAALDGKKIAVIGYGSQGHAHAQNLRDSGRDVIIGVRPGKSFDKAKEDGFDTYTVAEATKLADVIMILAPDEIQQELYEAEIAPNLEAGNAVGFAHGFNIHFEFIKVPADVDVFMCAPKGPGHLVRRTYEEGFGVPALYAVYQDATGNAKNIAMDWCKGVGAARVGLLETTYKEETEEDLFGEQAVLCGGLTALIEAGFEVLTEAGYAPELAYFEVLHEMKLIVDLIYEGGFKKMRQSISNTAEYGDYVSGPRVITEQVKENMKAVLADIQNGKFANDFVNDYKAGRPKLTAYREQAANLEIEKVGAELRKAMPFVGKNDDDAFKIYN

SEQ ID NO: 13374 - protein, 291 aa, Streptococcus pneumoniae
MIKDIQGDKMNNNLLVLQSDFGLVDGAVSAMIGVALEESPTLKIHHLTHDITPYNIFEGSYRLFQTVDYWPEGTTFVSVVDPGVGSKRKSVVAKTAKNQYIVTPDNGTLSFIKKHVGIVAIREISEVANRRQNTEHSYTFHGRDVYAYTGAKLASGHITFEEVGPELSVDQIVELPVVATIIEDHLVKGAIDILDVRFGSLWTSITREEFYKLEPEFGDRFEVTIYHADMLVYQNQVVYGKSFADVRIGQPILYINSLYRLGLAINQGSFAKAYNVGVGSSWTIEIKKIEG

SEQ ID NO: 13375 - protein, 216 aa, Streptococcus pneumoniae
MKDKQTFLMKGSFALLLFVILGYMVKFYPETLVNFDQSIQTAIRGDLPDYLTILFRALTRLIDIPVIITWVVITAFVFYRKRWKIESFFMLGNLALAGLLIVTFKNIYQRPRPAILHLVEEKGFSFPSGHSLAVTLMVGTLIVILSQRIKNPVWRKIVQIVLGLYLVSVLVSRVYLGVHYPSDVLASLCVGLGVLFIEFPFYDKLRFQWRFKGKQK

SEQ ID NO: 13376 - protein, 535 aa, Streptococcus pneumoniae
MSTKYIFVTGGVVSSIGKGIVAASLGRLLKNRGLKVTIQKFDPYINIDPGTMSPYQHGEVFVTDDGAETDLDLGHYERFIDINLNKYSNVTTGKIYSEVLRKERRGEYLGATVQVIPHITDALKEKIKRAALTTDSDVIITEVGGTVGDIESLPFLEALRQMKADVGADNVMYIHTTLLPYLKAAGEMKTKPTQHSVKELRGLGIQPNMLVIRTEEPAGQGIKNKLAQFCDVAPEAVIESLDVEHLYQIPLNLQAQGMDQIVCDHLKLDAPAADMTEWSAMVDKVMNLKKQVKISLVGKYVELQDAYISVVEALKHSGYVNDVEVKINWVNANDVTAENVAELLSDADGIIVPGGFGQRGTEGKIQAIRYARENDVPMLGVCLGMQLTCIEFARHVLGLEGANSAELAPETKYPIIDIMRDQIDIEDMGGTLRLGLYPSKLKRGSKAAAAYHNQEVVQRRHRHRYEFNNAFREQFEAAGFVFSGVSPDNRLVEIVEIPENKFFVACQYHPELSSRPNRPEELYTAFVTAAVENSN

SEQ ID NO: 13377 - protein, 398 aa, Streptococcus pneumoniae
MAKLTVKDVDLKGKKVLVRVDFNVPLKDGVITNDNRITAALPTIKYIIEQGGRAILFSHLGRVKEESDKAGKSLAPVAADLAAKLGQDVVFPGVTRGAELEAAINALEDGQVLLVENTRYEDVDGKKESKNDPELGKYWASLGDGIFVNDAFGTAHRAHASNVGISANVEKAVAGFLLENEIAYIQEAVETPERPFVAILGGSKVSDKIGVIENLLEKADKVLIGGGMTYTFYKAQGIEIGNSLVEEDKLDVAKALLEKANGKLILPVDSKEANAFAGYTEVRDTEGEAVSEGFLGLDIGPKSIAKFDEALTGAKTVVWNGPMGVFENPDFQAGTIGVMDAIVKQPGVKSIIGGGDSAAAAINLGRADKFSWISTGGGASMELLEGKVLPGLAALTEK

SEQ ID NO: 13378 - protein, 448 aa, Streptococcus pneumoniae
MPITAADIRREVKEKNVTFIRLMFSDILGTMKNVEIPATDEQLDKVLSNKVMFDGSSIEGFVRINESDMYLYPDLDTWTVFPWGDENGSVAGLICDVYTTEGEPFAGDPRGNLKRALRHMEEVGFKSFNLGPEPEFFLFKLDENGDPTLEVNDKGGYFDLAPTDLADNTRREIVNVLTKMGFEVEASHHEVAVGQHEIDFKYDEVLRACDKIQIFKLVVKTIARKHGLYATFMAKPKFGIAGSGMHCNMSLFDAEGNNAFFDPNDPKGMQLSETAYHFLGGLIKHAYNYTAIMNPTVNSYKRLVPGYEAPVYIAWAGRNRSPLVRVPASRGMGTRLELRSVDPMANPYVAMAVLLEVGLYGIENKIEAPAPIEENIYIMTAEERKEAGITDLPSTLHNALKALTEDEVVKAALGDHIYTSFLEAKRIEWASYATFVSQWEIDNYLDLY

SEQ ID NO: 13379 - protein, 607 aa, Streptococcus pneumoniae
MSKIIGIDLGTTNSAVAVLEGTESKIIANPEGNRTTPSVVSFKNGEIIVGDAAKRQAVTNPDTVISIKSKMGTSEKVSANGKEYTPQEISAMILQYLKGYAEDYLGEKVTKAVITVPAYFNDAQRQATKDAGKIAGLEVERIVNEPTAAALAYGLDKTDKEEKILVFDLGGGTFDVSILELGDGVFDVLSTAGDNKLGGDDFDQKIIDHLVAEFKKENGIDLSTDKMAMQRLKDAAEKAKKDLSGVTSTQISLPFITAGEAGPLHLEMTLTRAKFDDLTRDLVERTKVPVRQALSDAGLSLSEIDEVILVGGSTRIPAVVEAVKAETGKEPNKSVNPDEVVAMGAAIQGGVITGDVKDVVLLDVTPLSLGIETMGGVFTKLIDRNTTIPTSKSQVFSTAADNQPAVDIHVLQGERPMAADNKTLGRFQLTDIPAAPRGIPQIEVTFDIDKNGIVSVKAKDLGTQKEQTIVIQSNSGLTDEEIDRMMKDAEANAEADKKRKEEVDLRNEVDQAIFATEKTIKETEGKGFDAERDAAQAALDDLKKAQEDNNLDDMKAKLEALNEKAQGLAVKLYEQAAAAQQAQEGAEGAQATGNAGDDVVDGEFTEK

SEQ ID NO: 13380 - protein, 227 aa, Streptococcus pneumoniae
MDLGDNELTLTPIPGKSGKAYMGSYPDGKRIFVKMNTSPILPGLAREQIAPQLLWSRRLADGRDMCAQEWLTGKILTPYDMNRKQIVNILTRLHRSRPLMTQLSRLGYAMETPVDLLQSWQETAPDALRKNHFISEVMADLRQTIPGFREDHATIVHGDVRHSNWIETDSGLIYLVDWDSVRLTDRMFDVAHMLCHYISEHQWKEWLTYYGYKYNQTVLSKLYWYGQ

SEQ ID NO: 13381 - protein, 900 aa, Streptococcus pneumoniae
MKSHSSSVEEAVAAKIAASFKPAAAPKVEAKPAAPKVSAEKKTEKSEPAKPAVAKEEAKPAEPVAPKTEKVAAKPQSRNFKAEREARAKEQAERRKQNKGNNRDQQQNGNRQKNDGRNGGKQGQSNRDNRRFNDQAKKQQGQQKRRNERRQQEDKRSNQAAPRIDFKARAAALKAEQNAEYARSSEERFKQYQAAKEALAQANKRKEPEEIFEEAAKLAEQAQQVQAVVEVVPEKKEPAVDTRRKKQARPDKNRDDYDHEEDGPRKQQKNRSSQNQVRNQKNSNWNNNKKNKKGNNKNNRNQTPKPVTERKFHELPTEFEYTDGMTVAEIAKRIKREPAEIVKKLFMMGVMATQNQSLDGETIELLMVDYGIEAKQKVEVDNADIERFFVEDGYLNEDELVERPPVVTIMGHVDHGKTTLLDTLRNSRVATGEAGGITQHIGAYQIVENGKKITFLDTPGHAAFTSMRARGASVTDITILVVAADDGVMPQTIEAINHSKAANVPIIVAINKIDKPGANPERVIGELAEHGVMSTAWGGDSEFVEISAKFNQNIEELLETVLLVAEIQELKADPTVRAIGTVIEARLDKGKGAVATLLVQQGTLNVQDPIVVGNTFGRVRAMTNDLGRRVKVAGPSTPVSITGLNEAPMAGDHFAVYEDEKSARAAGEERAKRALMKQRQATQRVSLENLFDTLKAGELKSVNVIIKADVQGSVEALSASLQKIDVEGVKVTIVHSAVGAINESDVTLAEASNAFIVGFNVRPTPQARQQAEADDVEIRLHSIIYKVIEEMEEAMKGMLDPEFEEKVIGEAVIRETFKVSKVGTIGGFMVINGKVARDSKVRVIRDGVVIYDGELASLKHYKDDVKEVTNGREGGLMIDGYNDIKMDDVIEAYVMEEIKR

SEQ ID NO: 13382 - protein, 883 aa, Streptococcus pneumoniae
MSKELSSKYNPAEVEAGRYQKWLDADVFKPSGDQKAKPYSIVIPPPNVTGKLHLGHAWDTTLQDIIIRQKRMQGFDTLWLPGMDHAGIATQAKVEERLRGEGISRYDLGRESFLTKVWEWKDEYATTIKEQWGKMGLSVDYSRERFTLDEGLSKAVRKVFVDLYKKGWIYRGEFIINWDPAARTALSDIEVIHKDVEGAFYHMNYMLEDGSRALEVATTRPETMFGDVAIAVNPEDPRYKDLIGKNVILPIANKLIPIVGDEHADPEFGTGVVKITPAHDPNDFLVGQRHNLPQVNIMNDDGTMNELVFEFSGMDRFEARKAVVAKLEEIGALVKIEKRVHSVGHSERTGVVVEPRLSTQWFVKMDQLAKNAIANQDTEDKVEFYPPRFNDTFLQWMENVHDWVISRQLWWGHQIPAWYNADGEMYVGEEAPEGDGWTQDEDVLDTWFSSALWPFSTMGWPEVDSEDFKRYFPTSTLVTGYDIIFFWVSRMIFQSLEFTGRQPFQNVLIHGLIRDEQGRKMSKSLGNGIDPMDVIEKYGADALRWFLSNGSAPGQDVRFSYEKMDASWNFINKIWNISRYILMNNGGLTLDVAHDNVTKVATGEAGNVTDRWILHNLNETIAKVTENFDKFEFGVAGHILYNFIWEEFANWYVELTKEVLYSDNEDDKVITRSVLLYTLDKILRLLHSIMPFVTEEIFGQYAEGSIVTAAYPTVNPAFEDLAAHTGVESLKDLIRAVRNARAEVNVAPSKPITILVKTSDSDLEAFFNSNVNYIKRFTNPEHLEIASTIPAPELAMSSVITGAEIFLPLVDLLNVEEELARLEKELAKWQKELDMVGKKLSNERFVANAKPEVVQKEKDKQADYQAKYDVTVARIDEMKKLVK

SEQ ID NO: 13383 - protein, 375 aa, Streptococcus pneumoniae
MVPRVNAPSGVFGMWFSFYLRETDGGNMSTIEEQLKALREETLTSLKQITAGNEKEMQDLRVSVLGKKGSLTEILKGMKDVSAEMRPIIGKHVNEARDVLTAAFEETAKLLEEKKVAAQLASESIDVTLPGRPVATGHRHVLTQTSEEIEDIFIGMGYQVVDGFEVEQDYYNFERMNLPKDHPARDMQDTFYITEEILLRTHTSPVQARAMDAHDFSKGPLKMISPGRVFRRDTDDATHSHQFHQIEGLVVGKNISMADLQGTLQLIVQKMFGEERQIRLRPSYFPFTEPSVEVDVSCFKCGGEGCNVCKKTGWIEIMGAGMVHPRVLEMSGIDATVYSGFAFGLGQERVAMLRYGINDIRGFYQGDVRFSEQFK

SEQ ID NO: 13384 - protein, 169 aa, Streptococcus pneumoniae
MIRKVEMADVEVLAKIAKQAFRETFAYDNTEEQLQEYFEEAYSLKTLSTELGNPDSETYFIMHEEEIAGFLKVNWGSAQTERELEDAFEIQRLYVLQKFQGFGLGKQLFEFALELATKNSFSWAWLGVWEHNTKAQAFYNRYGFEKFSQHHFMVGQKVDTDWLLRKKLR

SEQ ID NO: 13385 - protein, 800 aa, Streptococcus pneumoniae
MLISYKWLKELVDIDVPSQELAEKMSTTGIEVEGVESPAAGLSKIVVGEVLSCEDVPETHLHVCQVNVGEEERQIVCGAPNVRAGIKVMVALPGARIADNYKIKKGKIRGLESLGMICSLGELGISDSVVPKEFADGIQILPEDAVPGEEVFSYLDLDDEIIELSITPNRADALSMCGVAHEVAAIYDKAVNFKEFTLTETNEAAADALSVSIETDKAPYYAARILDNVTIAPSPQWLQNLLMNEGIRPINNVVDVTNYILLYFGQPMHAFDLDNFEGTDIRVREARAGEKLVTLDGEERDLDVNDLVITVADKPVALAGVMGGQATEISEKSSRVVLEAAVFNGKSIRKTSGRLNLRSESSSRFEKGINVATVNEALDAAASLIAELAGATVRKGIVSAGELDTSDVEVSSTLADVNRVLGTELSYADVEDVFRRLGFGLSGNADSFTVRVPRRRWDITIEADLFEEIARIYGYDRLPTSLPKDDGTAGELTATQKLRRQVRTIAEGAGLTEIITYTLTTPEKAVEFTAQPSNLTELMWPMTVDRSVLRQNMISGILDTVAYNVARKNKNLALYEIGKVFEQTGNPKEELPNEINSFAFALTGLVAEKDFQTAAVPVDFFYAKGILEALFTRLGLQVTYTATSEIASLHPGRTAVISLGDQVLGFLGQVHPVTAKAYDIPETYVAELNLSAIEAALQPATPFVEITKFPAVSRDVALLLKAEVTHQEVVDAIQAAGVKRLTDIKLFDVFSGEKLGLGMKSMAYSLTFQNPEDSLTDEEVARYMEKIQASLEEKVNAEVR

SEQ ID NO: 13386 - protein, 205 aa, Streptococcus pneumoniae
MGWWRETIDIVKENDPAARTTLEVLLTYPGVKALAAHRLSHFLWKHGFKLLARMYSQFWRFWTQIEIHPGAQIDSGVFIDHGSGLVIGETAIVEKGVLLYHGVTLGGTGKDCGKRHPTVRKGALISAHAQVIGPVEIGENAKVGAAAVVVADVPSDVTVVGIPAKIVRLHGKKDEPVIHEVEEKREYYVNKLEQAKDASHRSSGL

SEQ ID NO: 13387 - protein, 271 aa, Streptococcus pneumoniae
MTNTSFSIEQFSLKGKIALITGASYGIGFAIAKSYAEAGATIVFNDINQDLVNKGIEAYREVGIEAHGYVCDVTDEDGIQAMVKQIEQEVGVIDILVNNAGIIRRVPMCEMSAADFRKVIDIDLNAPFIVSKAVIPSMIKKGHGKIINICSMMSELGRETVSAYAAAKGGLKMLTRNIASEYGGANIQCNGIGPGYIATPQTAPLRELQEDGSRHPFDQFIIAKTPAARWGNPEDLMGPAVFLASDASNFVNGHILYVDGGILAYIGKQPE

SEQ ID NO: 13388 - protein, 293 aa, Streptococcus pneumoniae
MAIVSAEKFVQAARDNGYAVGGFNTNNLEWTQAILRAAEAKKAPVLIQTSMGAAKYMGGYKVARNLIANLVESMGITVPVAIHLDHGHYEDALECIEVGYTSIMFDGSHLPVEENLKLAKEVVEKAHAKGISVEAEVGTIGGEEDGIIGKGELAPIEDAKAMVETGIDFLAAGIGNIHGPYPVNWEGLDLDHLQKLTEALPGFPIVLHGGSGIPDEQIQAAIKLGVAKVNVNTECQIAFANATRKFARDYEANEAEYDKKKLFDPRKFLADGVKAIQASVEERIDVFGSEGKA

SEQ ID NO: 13389 - protein, 225 aa, Streptococcus pneumoniae
MTDLSSWTAYFQDFGQFFNGFLFTLALAVGSFILAMVLGIFFGAMSTSKRPILRILARIFVEFYQNTPLLVQFVIVFYGLPLISDHIIMIPIYWTAVLCVGLYHGAYIAEVIRSGIQSIPSGQMEAALSQGFTYISAMRLIILPQAFRIILPPLTNQIVNLIKNTSTVAIISGVDLMFVTKSWSALNGNYIPAFLGAALLYFALCFPVAQFGRKMEQANKKAYSL

SEQ ID NO: 13390 - protein, 744 aa, Streptococcus pneumoniae
MDVFLITPTYEWQFALQVEDADFTKIAKKAGLGPEVARLLFERGIQDQESLKKFLEPSLEDLHDAYLLHDMDKAVERIRQAIEEGENILVYGDYDADGMTSASIVKESLEQLGAECRVYLPNRFTDGYGPNASVYKYFIEQEGISLIVTVDNGVAGHEAIALAQSMGVDVIVTDHHSMPETLPDAYAIVHPEHPDADYPFKYLAGCGVAFKLACALLEEVQVELLDLVAIGTIADMVSLTDENRILVQYGLEMLGHTQRIGLQEMLDMAGIAANEVTEETVGFQIAPRLNALGRLDDPNPAIDLLTGFDDEEAHEIALMIHQKNEERKEIVQSIYEEAKTMVDPEKKVQVLAKEGWNPGVLGIVAGRLLEELGQTVIVLNIEDGRAKGSARSVEAVDIFEALDPHRDLFIAFGGHAGAAGMTLEVEQLSDLSQVLEDYVREKGADAGGKNKLNLDEELDLEALSLETVKSFERLAPFGMDNQKPIFYIKNFQVESARTMGAGNAHLKLKISKGEASFEVVAFGQGRWATEFSQTKNLELAVKLSVNQWNGQTALQLMMVDARVEGVQLFNIRGKNAVLPEGVPVLDFPGELPNLAASEAVVVKNIPEDITQLKTIFQEQHFSAVYFKNDIDKAYYLTGYGTRDQFAKLYKTIYQFPEFDIRYKLKDLAAYLNIQQILLVKMIQVFEELGFVTIKDGVMTVNKEAPKREIGESQIYQNLKQTVKDQEMMALGTVQEIYDFLMEKE

SEQ ID NO: 13391 - protein, 553 aa, Streptococcus pneumoniae
MSNISLTTLGGVRENGKNMYIAEIGESIFVLNVGLKYPENEQLGVDVVIPNMDYLFENSDRIAGVFLTHGHADAIGALPYLLAEAKVPVFGSELTIELAKLFVKGNDAVKKFNDFHVIDENTEIDFGGTVVSFFPTTYSVPESLGIVLKTSEGSIVYTGDFKFDQTASESYATDFARLAEIGRDGVLALLSDSANADSNIQVASESEVRDEITQTIADWEGRIIVAAVSSNLSRIQQIFDAADKTGRRIVLTGFDIENIVRTAIRLKKLSLANEILLIKPKDMSRFEDHELIILETGRMGEPINGLRKMSIGRHRYVEIKDGDLVYIATAPSIAKEAFVARVENMIYQAGGVVKLITQSLHVSGHGNVRDLQLMINLLQPKYLFPVQGEYRELDAHAKAAMAVGMLPERIFIPKKGTTMAYENGDFVPAGSVSAGDILIDGNAIGDVGNVVLRDRKVLSEDGIFIVAITVNRREKKIVARARVHTRGFVYLKKSRDILRESSELINQTVEEYLQGDDFDWADLKGKVRDNLTKYLFDQTKRRPAILPVVMEAK

SEQ ID NO: 13392 - protein, 406 aa, Streptococcus pneumoniae
MYRYQIGIPTLEYDQFVKEHELANVLQSSAWEEVKSNWQHEKFGVYREEKLLATASILIRTLPLGYKMFYIPRGPILDYGDKELLNFAIQSIKSYARSKRVVFVTFDPSICLSQSLINQEKTEFPENLAIIDSLQQMGVRWSGKTEEMGDTIQPRIQAKIYKENFEEDKLSKSTKQAIRTARNKGLEIQYGGLELLDSFSELMKKTEKRKEIHLRNEAYYKKLLDNFKDKAYITLATLDVSKRSQELEEQLAKNRALEETFTESTRTSKVEAQKKEKERLLEELTFLQEYIDVGQARVPLAATLSLEFGTTSVNIYAGMDDDFKRYNAPILTWYETARYAFERGMVWQNLGGVENSLNGGLYHFKEKFNPTIEEYLGEFTMPTHPLYPLLRLALDFRKTLRKKHRK

SEQ ID NO: 13393 - protein, 410 aa, Streptococcus pneumoniae
MALTTLTKEEFQTYSDQVSSRSFMQSVQMGDLLEKRGARIVYLALKQEGEIQVAALVYSLPMLGGLHMELNSGPIYTQQDALPVFYAELKEYAKQNGVLELLVKPYETYQTFDSQGNPIDAEKKSIIQGLTDLGYQFDGLTTGYPGGEPDWLYYKDLTELTEKSLLKSFSKKGKPLVKKAETFGIRLKKLKREELSIFKNITKETSERREYSDKSLEYYEHFYDTFGEQAEFLIASLNFSDYMSKLQGEQSKLEENLDKLRLDLSKNPHSEKKQNQLREYSSQFETFEVRKAEARDLIEKYGEEDIVLAGSLFVYMPQETTYLFSGSYTEFNKFYAPALLQKYVMLESIKRGIPKYNFLGIQGIFDGSDGVLRFKQNFNGYIVRKAGTFRYHPSPLKYKAIQLLKKIVGR

SEQ ID NO: 13394 - protein, 466 aa, Streptococcus pneumoniae
MIAIDFTAEVEKRKEDLLADLFSLLEINSERDDSKADAQHPFGPGPVKALEKFLEIADRDGYPTKNVDNYAGHFEFGDGEEVLGIFAHMDVVPAGSGWDTDPYTPTIKDGRLYARGASDDKGPTTACYYGLKIIKELGLPTSKKVRFIVGTDEESGWADMDYYFEHVGLAKPDFGFSPDAEFPIINGEKGNITEYLHFAGENTGAARLHSFTGGLRENMVPESATAVVSGDLADLQAKLDAFVAEHKLRGELQEEAGKYKVTIIGKSAHGAMPASGVNGATYLALFLSQFGFAGPAKDYLDIAGKILLNDHEGENLKIAHVDEKMGALSMNAGVFRFDETSADNTIALNIRYPKGTSPEQIKSILENLPVASVSLSEHGHTPHYVPMEDPLVQTLLNVYEKQTGLQGHEQVIGGGTFGRLLERGVAYGAMFPDSIDTMHQANEFIALDDLFRAAAIYAEAIYELIK

SEQ ID NO: 13395 - protein, 446 aa, Streptococcus pneumoniae
MKEIFTAKKGTLTGLLLFGIFFGAGNLIFPPSLGALSGEHFLPAIAGFVFSGVGIAVLTLIIGTLNPKGYIYEISTKIAPWFATLYLSVLYLSIGPFFATPRTATTAYEVGISPLLSDANKGLGLIVFTVLYFAAAYLISLNPSKILDRIGRILTPVFAILIVILVVLGAIKYGGTSPQAASAAYQASAFGTGFLEGYNTLDALASVAFSVIAVQTLKQLGFSSKTEYISTIWVVGIVVALAFSALYIGLGFLGNHFPVPAEAMKGGTPGVYILSQATQEIFGSTAQLFLAAMVTVTCFTTTVGLIVSTAEFFNERFPQISYKVYATAFTLIGFAIANLGLDAIIKYSIPVLVILYPITIAIVMIVIVNKFVALSKPGMQLTIAVVTVIAIANVLGSSFKVEFLANLVSVLPFAKASLPWLVPAIVGILLSLVLPNKQESDVFEME

SEQ ID NO: 13396 - protein, 345 aa, Streptococcus pneumoniae
MNQTVEYIKELTAIASPTGFTREIADYLVKTLEGFGYQPVRTSKGGVNVTIKGQNDEQHRYVTAHVDTLGAIVRAVKPDGRLKMDRIGGFPWNMIEGENCTIHVASTGEKVSGTILIHQTSCHVYKDAGTAERTQDNMEVRLDAKVTSEKETRALGIEVGDFISFDPRTVVTETGFIKSRHLDDKVSAAILLNLLRIYKEEKIELPVTTHFAFSVFEEVGHGANSNIPAQVVEYLAVDMGAMGDDQQTDEYTVSICVKDASGPYHYDFRQHLVALAKEQDIPFKLDIYPFYGSDASAAMSAGAEVKHALLGAGIESSHSYERTHIDSVIATERMVDAYLKSTLVD

SEQ ID NO: 13397 - protein, 229 aa, Streptococcus pneumoniae
MAKKSKQLRAALEKIDSTKAYSVEEAVALAKETNFAKFDATVEVAYNLNIDVKKADQQIRGAMVLPNGTGKTSRVLVFARGAKAEEAKAAGADFVGEDDLVAKINDGWLDFDVVIATPDMMALVGRLGRVLGPRNLMPNPKTGTVTMDVAKAVEESKGGKITYRADRAGNVQAIIGKVSFEAEKLVENFKAFNETIQKAKPATAKGTYVTNLTITTTQGVGIKVDVNSL

SEQ ID NO: 13398 - protein, 450 aa, Streptococcus pneumoniae
MKVIDQFKNKKVLVLGLAKSGESAARLLDKLGAIVTVNDGKPFEDNPAAQSLLEEGIKVITGGHPLELLDEEFALMVKNPGIPYNNPMIEKALAKRIPVLTEVELAYLISEAPIIGITGSNGKTTTTTMIGEVLTAAGQHGLLSGNIGYPASQVAQIASDKDTLVMELSSFQLMGVQEFHPEIAVITNLMPTHIDYHGSFSEYVAAKWNIQNKMTAADFLVLNFNQDLAKDLTSKTEATVVPFSTLEKVDGAYLEDGQLYFRGEVVMAANEIGVPGSHNVENALATIAVAKLRDVDNQTIKETLSAFGGVKHRLQFVDDIKGVKFYNDSKSTNILATQKALSGFDNSKVVLIAGGLDRGNEFDELVPDITGLKKMVILGQSAERVKRAADKAGVAYVEATDIADATRKAYELATQGDVVLLSPANASWDMYANFEVRGDLFIDTVAELKE

SEQ ID NO: 13399 - protein, 352 aa, Streptococcus pneumoniae
MKKIVFTGGGTVGHVTLNLLLMPKFIEDGWEVHYIGDKRGIEHQEILKSGLDVTFHSIATGKLRRYFSWQNMLDVFKVGWGIVQSLFIMLRLRPQTLFSKGGFVSVPPVIAARVSGVPVFIHESDLSMGLANKIAYKFATKMYSTFEQASSLSKVEHVGAVTKVSDQKNPEPDELVDIQTHFNHKLPTVLFVGGSAGARVFNQLVTDHKKELTERYNIINLTGDSSLNELSQNLFRVDYVTDLYQPLMELADIVVTRGGANTIFELLAIAKLHVIVPLGREASRGDQIENAAYFVKKGYAEDLQESDLTLDSLEEKLSHLLSHKEDYQAKMKASKELKSLADFYQLLKKDLS

SEQ ID NO: 13400 - protein, 210 aa, Streptococcus pneumoniae
MTLAKDIASHLLKIQAVYLKPKEPFTWASGIKSPIYTDNRVTLAYPETRTLIENGFVEAIKEAFPEVEVIAGTATAGIPHGAIIADKMDLPFAYIRSKPKDHGAGNQIEGRVAQGQKMVVVEDLISTGGSVLEAVAAAKREGADVLGVVAIFSYQLPKADKNFADAGVKLVTLSNYSDLIHLAQEEGYITPEGLYLLKRFKEDQENWQEG

SEQ ID NO: 13401 - protein, 496 aa, Streptococcus pneumoniae
MSTEHMEELNDQQIVRREKMAALREQGIDPFGKRFERTANSQELKDKYANLDKEQLHDKNETATIAGRLVTKRGKGKVGFAHLQDREGQIQIYVRKDAVGEENYEIFKKADLGDFLGVEGEVMRTDMGELSIKATHITHLSKALRPLPEKFHGLTDVETIYRKRYLDLISNRESFERFVTRSKIISEIRRYLDQKGFLEVETPVLHNEAGGAAARPFITHHNAQNIDMVLRIATELHLKRLIVGGMERVYEIGRIFRNEGMDATHNPEFTSIEVYQAYADFQDIMDLTEGIIQHAAKSVKGDGPVNYQGTEIKINEPFKRVHMVDAIREITGVDFWQDMTLEEAKAIAAEKKVPVEKHYTEVGHIINAFFEEFVEETLIQPTFVYGHPVAVSPLAKKNPEDQRFTDRFELFIMTKEYGNAFTELNDPIDQLSRFEAQAKAKELGDDEATGIDYDYIEALEYGMPPTGGLGIGIDRLCMLLTDTTTIRDVLLFPTMK

SEQ ID NO: 13402 - protein, 378 aa, Streptococcus pneumoniae
MSYKTSNAEGHVDFINTYDLEPMAQQVIPKAAFGYIASGAEDTFTLRENIRAFNHKLIVPHTLCDVENPSTEIEFAGEKLSSPIIMAPVAAHKLANEQGEVATARGVHEFGSLYTTSSYSTVDLPEISEALQGTPHWFQFYFSKDDGINRHIMDRVKAEGYKAIVLTADATVGGNREVDKRNGFVFPVGMPIVEEYLPEGAGKSMDFVYKSAKQRLSPRDVEFIAEYSGLPVYVKGPQCREDVERSLAAGASGIWVTNHGGRQIDGGPAAFDSLQEVAEAVDRRVPIVFDSGVRRGQHVFKALASGADLVAIGRPVIYGLALGGSVGVRQVFEHLNAELKTVMQLSGAQTIEDVKHFKLRHNPYNPTFPVDPRDLKLY

SEQ ID NO: 13403 - protein, 209 aa, Streptococcus pneumoniae
MFHKELLKLYFICGTTTCQGKNLYTVVEEALKGGITLFQFREKGESALEGLEKLELAIQIKELCKKYNVPFIVNDDIDLAMEIDADGVHVGQDDIGVDEIRKLMPDKIIGLSIRNEEEFQQSKVEYVDYVGVGPVFDTQSKDDAGGAIGYEGLELMRKLLPQMPLVAIGGIQTKHIKDIIKTNMDGVSIISAISYAKNIEKTVREMSEQ

SEQ ID NO: 13404 - protein, 230 aa, Streptococcus pneumoniae
MEFTDIAMELSKKAWQASFHHPFILQLQEGNLEPAIFRYYLIQDAYYLKAFSEIYHLLADKTSNQEMKRLLKQNAQGLVEGELFIRQQFFKELEISDQEMEQHPIAPTCYHYISHIYRQFAEPNLAIAFASLLPCPWLYHDIGKSLNLKPSPNPLYQQWIETYITDELEQQIREEGALVNQLYRESDETDKQKMLDTFHISVHMEAKFWEMAYQHQTWKSDLQSLEKGEE

SEQ ID NO: 13405 - protein, 750 aa, Streptococcus pneumoniae
METMTEIVKASLENGIQKIRIQAEKGYHPAHIQLQKGIPAEITFHRATPSNCYKEILFEEEGILEPIGVDEEKVIRFTPQELGRHEFSCGMKMQKGSYTVVEKTRKSLSLLQRFWITSIFTVPLVILMIGMLTGSISHQVMHWGTFLATTPIMLVAGKPYIQSAWASFKKHNANMDTLVALGTLVAYFYSLVALFAGLPVYFESAGFILFFVLLGAVFEEKMRKNTSQAVEKLLDLQAKTAEVLSDDSYVQVPLEQVKVGDLIRVRPGEKIAVDGVVVEGVSSIDESMVTGESLPVDKTVGDTVIGSTINHSGTLVFRAEKVGSETVLAQIVDFVKKAQTSRAPIQDLTDKISGIFVPVVVILGIMTFWVWFVLLRDSVVVLGASFVSSLLYGVAVLIIACPCALGLATPTALMVGTGRSAKMGVLLKNGTVLQEIQKVQTLVFDKTGTLTEGKPVVTDIIGDEVEVFGLAASLEDASQHPLAEAIVKRASEAGLEFQTVENFQALHGKGVSGRINGKQVLLGNAKMLDGMDISNTYQDKLEELEKEAKTVVFLAVDNEIKGLLALQDIPKENAKLAISQLKKRGLRTVMLTGDNAGVARAIADQIGIEEVIAGVLPEEKAHEIHKLQAAGKVAFVGDGINDAPALSVADVGIAMGAGTDIAIESADLVLTTNNLLGVVRAFDMSKKTFHRILLNLFWAFIYNVVGIPIAAGVFSGVGLALNPELAGLAMAFSSVSVLTSSLLLNFSKID

SEQ ID NO: 13406 - protein, 750 aa, Streptococcus pneumoniae
MKWTKRVIRYATKNRKSPAENRRRVGKSLSLLSVFVFAIFLVNFAVIIGTGTRFGTDLAKEAKKVHQTTRTVPAKRGTIYDRNGVPIAEDATSYNVYAVIDENYKSATGKILYVEKTQFNKVAEVFHKYLDMEESYVREQLSQPNLKQVSFGAKGNGITYANMMSIKKELEAAEVKGIDFTTSPNRSYPNGQFASSFIGLAQLHENEDGSKSLLGTSGMESSLNSILAGTDGIITYEKDRLGNIVPGTEQVSQRTMDGKDVYTTISSPLQSFMETQMDAFQEKVKGKYMTATLVSAKTGEILATTQRPTFDADTKEGITEDFVWRDILYQSNYEPGSTMKVMMLAAAIDNNTFPGGEVFNSSELKIADATIRDWDVNEGLTGGRMMTFSQGFAHSSNVGMTLLEQKMGDATWLDYLNRFKFGVPTRFGLTDEYAGQLPADNIVNIAQSSFGQGISVTQTQMIRAFTAIANDGVMLEPKFISAIYDPNDQTARKSQKEIVGNPVSKDAASLTRTNMVLVGTDPVYGTMYNHSTGKPTVTVPGQNVALKSGTAQIADEKNGGYLVGLTDYIFSAVSMSPAENPDFILYVTVQQPEHYSGIQLGEFANPILERASAMKDSLNLQTTAKALEQVSQQSPYPMPSVKDISPGDLAEELRRNLVQPIVVGTGTKIKNSSAEEGKNLAPNQQVLILSDKAEEVPDMYGWTKETAETLAKWLNIELEFQGSGSTVQKQDVRANTAIKDIKKITLTLGD

SEQ ID NO: 13407 - protein, 391 aa, Streptococcus pneumoniae
MKHFDTIVIGGGPAGMMATISSSFYGQKTLLIEKNRKLGKKLAGTGGGRCNVTNNGSLDNLLAGIPGNGRFLYSVFSQFDNHDIINFFTENGVKLKVEDHGRVFPASDKSRTIIEALEKKITELGGQVATQIEIVSVKKVDDQFVLKSADQTFTCEKLIVTTGGKSYPSTGSTGFGHEIARHFKHTITDLEAAESPLLTDFPHKALQGISLDDVTLSYGKHVITHDLLFTHFGLSGPAALRMSSFVKGGEVLSLDVLPQLSEKDLVTFLEENREKSLKNALKTLLPERLAEFFVQGYPEKVKQLTEKEREQLVQSIKELKIPVTGKMSLAKSFVTKGGVSLKEINPKTLESKLVPGLHFAGEVMDINAHTGGFNITSALCTGWVAGSLHYD

SEQ ID NO: 13408 - protein, 209 aa, Streptococcus pneumoniae
MGKIEVINHPLIQHKLSILRRTDTSTKAFRELVDEIAMLMGYEVLRDLPLEDVEIETPITKTVQKQLAGKKLAIVPILRAGIGMVDGLLSLVPAAKVGHIGMYRDEETLQPVEYLVKLPEDIDQRQIFVVDPMLATGGSAILAVDSLKKRGASNIKFVCLVSAPEGVKALQEAHPDVEIFTAALDERLNEHGYIVPGLGDAGDRLFGTK

SEQ ID NO: 13409 - protein, 326 aa, Streptococcus pneumoniae
MFISISAGIVTFLLTLVGIPAFIQFYRKAQITGQQMHEDVKQHQAKAGTPTMGGLVFLITSVLVAFFFALFSSQFSNNVGMILFILVLYGLVGFLDDFLKVFRKINEGLNPKQKLALQLLGGVIFYLFYERGGDILSVFGYPVHLGFFYIFFALFWLVGFSNAVNLTDGVDGLASISVVISLFAYGVIAYVQGQMDILLVILAMIGGLLGFFIFNHKPAKVFMGDVGSLALGGMLAAISMALHQEWTLLIIGIVYVFETTSVMMQVSYFKLTGGKRIFRMTPVHHHFELGGLSGKGNPWSEWKVDFFFWGVGLLASLLTLAILYLM

SEQ ID NO: 13410 - protein, 318 aa, Streptococcus pneumoniae
MKENLKVNILWLLLLLAGYSLISVLVSVGVLNLFYVQILQQIGINIILAVGLNLIVGFSGQFSLGHAGFMAIGAYAAAIIGSKSPTYGAFFGAMLVGALLSGAVALLVGIPTLRLKGDYLAVATLGVSEIIRIFIINGGSLTNGAAGILGIPNFTTWQMVYFFVVITTIATLNFLRSPIGRSTLSVREDEIAAESVGVNTTKIKIIAFVFGAITASIAGSLQAGFIGSVVPKDYTFINSINVLIIVVFGGLGSITGAIVSAIVLGILNMLLQDVASVRMIIYALALVLVMIFRPGGLLGTWELSLSRFFKKSKKEEQN

SEQ ID NO: 13411 - protein, 701 aa, Streptococcus pneumoniae
MNNNFNNFNNMDDLFNQLMGGMRGYSSENRRYLINGREVTPEEFAYYRATGQLPGNAESDVQMQQQASGMKQDGVLAKLGRNLTAEAREGKLDPVIGRNKEIQEASEILSRRTKNNPVLVGDAGVGKTAVVEGLAQAIVNGDVPAAIKNKEIVSIDISGLEAGTQYRGSFEENVQNLVNEVKEAGNIILFFDEIHQILGAGSTGGDSGSKGLADILKPALSRGELTVIGATTQDEYRNTILKNAALARRFNEVKVNAPSAENTFKILQGIRDLYQQHHNVILPDEVLKAAVDYSVQYIPQRSLPDKAIDLVDVTAAHLAAQHPVTDVHAVEREIETEKDKQEKAVEAEDFEAALNYKTRIAELERKIENHTEDMKVTASVNDVAESVERMTGIPVSQMGASDIERLKDMAHRLQDKVIGQDKAVEVVARAICRNRAGFDEGNRPIGNFLFVGSTGVGKTELAKQLALDMFGTQDAIIRLDMSEYSDRTAVSKLIGTTAGYVGYDDNSNTLTERVRRNPYSIILLDEIEKADPQVITLLLQVLDDGRLTDGQGNTVNFKNTVIIATSNAGFGYEANLTEDADKPELMDRLKPFFRPEFLNRFNAVIEFSHLTKEDLSKIVDLMLAEVNQTLAKKDIDLVVSQAAKDYITEEGYDEVMGVRPLRRVVEQEIRDKVTDFHLDHLDAKHLEADMEDGVLVIREKV

SEQ ID NO: 13412 - protein, 447 aa, Streptococcus pneumoniae
MSFTKFQFKNYIREALKELKFTTPTEVQDKLIPIVLAGRDLVGESKTGSGKTHTFLLPIFQQLDEASDSVQAVITAPSRELATQIYQVARQISAHSDVEVRVVNYVGGTDKARQIEKLESNQPHIVIGTPGRIYDLVKSGDLAIHKAKTFVVDEADMTLDMGFLETVDKIAGSLPKDLQFMVFSATIPQKLQPFLKKYLSNPVMEKIKTKTVISDTIDNWLISTKGHDKNAQIYQLTQLMQPYLAMIFVNTKTRADELHSYLTAQGLKVAKIHGDIAPRERKRIMNQVQNLDFEYIVATDLAARGIDIEGVSHVINDAIPQDLSFFVHRVGRTGRNGLPGTAITLYQPSDDSDIRELEKLGIKFSPKMVKDGEFQDTYDRDRRANREKKQDKLDIEMIGLVKKKKKKVKPGYKKKIQWAVDEKRRKTKRAENRARGRAERKAKRQTF

SEQ ID NO: 13413 - protein, 396 aa, Streptococcus pneumoniae
MSERKLFTSESVSEGHPDKIADQISDAILDAILAKDPEAHVAAETAVYTGSVHVFGEISTNAYVDINRVVRDTIAEIGYTNTEYGFSAETVGVHPSLVEQSPDIAQGVNEALEVRGNADQDPLDLIGAGDQGLMFGFAVDETEELMPLPIALSHKLVRRLAELRKSGEISYLRPDAKSQVTVEYDENDRPVRVDTVVISTQHDPEATNEQIHQDVIDKVIKEVIPSSYLDDKTKFFINPTGRFVIGGPQGDSGLTGRKIIVDTYGGYSRHGGGAFSGKDATKVDRSASYAARYIAKNIVAAGLAKKAEVQLAYAIGVAQPVSVRIDTFGTGTVAESQLEKAARQIFDLRPAGIIQMLDLKRPIYRQTSAYGHMGRTDIDLPWERLDKVDALKEAVK

SEQ ID NO: 13414 - protein, 176 aa, Streptococcus pneumoniae
MRKEIAPELYNYNKFPGPEFHLHGDKVETEGIAFSLVENIKDAFDVTTFNQRFSEVLTKFDYIVGDWSNEQLRLRGFYKDDRTEEKLEKISRLQDYLLEYCSYGCAYFVLENEAPKRASFDKKMRKTEEETPSRKGKKPTQTKRKSNADKKNRRRQKDQHSQKEDKEQRHFVIRQK

SEQ ID NO: 13415 - protein, 90 aa, Streptococcus pneumoniae
MAVKIRLTRMGSKKKPFYRINVADSRSPRDGRFIETVGTYNPLVAENQVTLKEDRVLAWLANGAQPSDTVRNILSKEGVLKKFHDSKFSK

SEQ ID NO: 13416 - protein, 79 aa, Streptococcus pneumoniae
MDTIENLIIAIVKPLISQPDALTIKIEDTPEFLEYHLNLDQSDVGRVIGRKGRTISAIRTIVYSVPTEYKKVRIVIDEK

SEQ ID NO: 13417 - protein, 239 aa, Streptococcus pneumoniae
MKIDILTLFPEMFSPLEHSIVGKAREKGLLDIQYHNFRENAEKARHVDDEPYGGGQGMLLRVQPIFDSFDAIEKKNPRVILLDPAGKQFDQAYAEDLAQEEELIFICGHYEGYDERIKTLVTDEISLGDYVLTGGELAAMTMIDATVRLIPEVIGKESSHQDDSFSSGLLEYPQYTRPYDYRGMVVPDVLMSGHHEKIRQWRLYESLKKTYERRPDLLEHYQLTVEEEKMLAEIKENKE

SEQ ID NO: 13418 - protein, 679 aa, Streptococcus pneumoniae
MLEKQVSFAWKGKIMSEKNFYITTPIYYPSGKLHIGSAYTTIACDVLARYKRLMGYDVFYLTGLDEHGQKIQQKAEEAGITPQAYVDGMAVGVKELWQLLDISYDKFIRTTDDYHEKVVAQVFERLLAQDDIYLGEYSGWYSVSDEEFFTESQLAEVFRDEAGNVTGGIAPSGHEVEWVSEESYFLRLSKYQDRLVEFFKAHPEFITPDGRLNEMLRNFIEPGLEDLAVSRTTFTWGVPVPSNPKHVVYVWIDALLNYATALGYAQDEHGNFDKFWNGTVFHMVGKDILRFHSIYWPILLMMLDVKLPDRLIAHGWFVMKDGKMSKSKGNVVYPEMLVERYGLDPLRYYLMRNLPVGSDGTFTPEDYVGRINYELANDLGNLLNRTVSMINKYFDGQIPAYVEGVTEFDHVLAEVAEQSIADFHTHMEAVDYPRALEAVWTLISRTNKYIDETAPWVLAKDEALRDQLASVMSHLAASIRVVAHLIEPFMMETSRAVLTQLGLEEVSSLENLSLADFPADVTVVAKGTPIFPRLNMEEEIAYIKEQMEGNKPAVEKEWNPDEVELKLNKDEIKFEDFDKVEIRVAEVKEVSKVEGSDKLLQFRLDAGDGEDRQILSGIAKYYPNEQELVGKKVQIVANLKPRKMMKKYVSQGMILSAEHDGKLTLLTVDPAVPNGSVIG

SEQ ID NO: 13419 - protein, 535 aa, Streptococcus pneumoniae
MQEKKKKNAVVYQVYPKSFMDSNEDGVGDLPGITSKLDYLAKLGITAIWLSPVYDSPMDDNGYDIADYQAIAAIFGTMEDMDQLIAEAKKRDIRIIMDLVVNHTSDEHAWFVEACENPNSPERDYYIWRDEPNDLDSIFSGSAWEYDEKSGQYYLHFFSKKQPDLNWENEKLRQKIYEMMDFWIDKGIGGFRMDVIDMIGKIPDEKVVNNGPMLHPYLKEMNQATFGDKDLLTVGETWGATPEIAKLYSDPKGQELSMVFQFEHIGLQYQEGQPKWHYQKELNIAKLKEIFNKWQTELGVEDGWNSLFWNNHDLPRIVSIWGNDQEYREKSAKAFAILLHLMRGTPYIYQGEEIGMTNYPFETLDQVEDIESLNYAREALEKGVPIEEIMDSIRVIGRDNARTPMQWDESKNAGFSTGQPWLAVNPNYEMINVQEALANPDSIFYTYQKLVQIRKENSWLIRADFELLDTADKVFAYIRKDGDRRFLVVANLSNEEQDLTVEGNVKSVLIENTLAQEVFEKQILVPWDAFCVELL

SEQ ID NO: 13420 - protein, 648 aa, Streptococcus pneumoniae
MTEEIKNLQAQDYDASQIQVLEGLEAVRMRPGMYIGSTSKEGLHHLVWEIVDNSIDEALAGFASHIQVFIEPDDSITVVDDGRGIPVDIQEKTGRPAVETVFTVLHAGGKFGGGGYKVSGGLHGVGSSVVNALSTQLDVHVHKNGKIHYQEYRRGHVVADLEIVGDTDKTGTTVHFTPDPKIFTETTIFDFDKLNKRIQELAFLNRGLQISITDKRQGLEQTKHYHYEGGIASYVEYINENKDVIFDTPIYTDGEMDDITVEVAMQYTTGYHENVMSFANNIHTHEGGTHEQGFRTALTRVINDYARKNKLLKDNEDNLTGEDVREGLTAVISVKHPNPQFEGQTKTKLGNSEVVKITNRLFSEAFSDFLMENPQIAKRIVEKGILAAKARVAAKRAREVTRKKSGLEISNLPGKLADCSSNNPAETELFIVEGDSAGGSAKSGRNREFQAILPIRGKILNVEKASMDKILANEEIRSLFTAMGTGFGAEFDVSKARYQKLVLMTDADVDGAHIRTLLLTLIYRYMKPILEAGYVYIAQPPIYGVKVGSEIKEYIQPGADQEIKLQEALARYSEGRTKPTIQRYKGLGEMDDHQLWETTMDPEHRLMARVSVDDAAEADKIFDMLMGDRVEPRREFIEENAVYSTLDV

SEQ ID NO: 13421 - protein, 752 aa, Streptococcus pneumoniae
MLCQNCKINDSTIHLYTNLNGKQKQIDLCQNCYKIIKTDPNNSLFKGMTDLNNRDFDPFGDFFNDLNNFRPSSNTPPIPPTQSGGGYGGNGGYGSQNRGSAQTPPPSQEKGLLEEFGINVTEIARRGDIDPVIGRDDEIIRVIEILNRRTKNNPVLIGEPGVGKTAVVEGLAQKIVDGDVPHKLQGKQVIRLDVVSLVQGTGIRGQFEERMQKLMEEIRKREDIILFIDEIHEIVGAGSASDGNMDAGNILKPALARGELQLVGATTLNEYRIIEKDAALERRMQPVKVDEPTVDETITILKGIQKKYEDYHHVQYTDAAIEAAATLSNRYIQDRFLPDKAIDLLDEAGSKMNLTLNFVDPKVIDQRLIEAENLKSQATREEDFEKAAYFRDQIAKYKEMQKKKITDQDTPIISEKTIEHIIEQKTNIPVGDLKEKEQSQLIHLAEDLKSHVIGQDDAVDKIAKAIRRNRVGLGTPNRPIGSFLFVGPTGVGKTELSKQLAIELFGSADSMIRFDMSEYMEKHSVAKLVGAPPGYVGYDEAGQLTEKVRHNPYSLILLDEVEKAHPDVMHMFLQVLDDGRLTDGQGRTVSFKDAIIIMTSNAGTGKTEASVGFGAAREGRTNSVLGELGNFFSPEFMNRFDGIIEFKALSKDNLLQIVELMLADVNKRLSSNNIRLDVTDKVKEKLVDLGYDPKMGARPLRRTIQDYIEDTITDYYLENPSEKDLKAVMTSKGNIQIKSAKKAEVKSSEKEK

SEQ ID NO: 13422 - protein, 324 aa, Streptococcus pneumoniae
MMKILEGVTDMSSKANHAKTVICGIINVTPDSFSDGGQFFALEQALQQARKLIAEGASMLDIGGESTRPGSSYVEIEEEIQRVVPVIKAIRKESDVLISIDTWKSQVAEAALAAGADLVNDITGLMGDEKMPHVVAEARAQVVIMFNPVMARPQHPSSLIFPHFGFGQAFTEEELADFETLPIEELMEAFFERALARAAEAGIAPENILLDPGIGFGLTKKENLLLLRDLDKLHQKGYPIFLGVSRKRFVINILEENGFEVNPETELGFRNRDTASAHVTSIAARQGVEVVRVHDVASHRMAVEIASAIRLADEAENLDLKQYK

SEQ ID NO: 13423 - protein, 719 aa, Streptococcus pneumoniae
MNKPTILRLIKYLSISFLSLVIAAIVLGGGVFFYYVSKAPSLSESKLVATTSSKIYDNKNQLIADLGSERRVNAQANDIPTDLVKAIVSIEDHRFFDHRGIDTIRILGAFLRNLQSNSLQGGSALTQQLIKLTYFSTSTSDQTISRKAQEAWLAIQLEQKATKQEILTYYINKVYMSNGNYGMQTAAQNYYGKDLNNLSLPQLALLAGMPQAPNQYDPYSHPEAAQDRRNLVLSEMKNQGYISAEQYEKAVNTPITDGLQSLKSASNYPAYMDNYLKEVINQVEEETGYNLLTTGMDVYTNVDQEAQKHLWDIYNTDEYVAYPDDELQVASTIVDVSNGKVIAQLGARHQSSNVSFGINQAVETNRDWGSTMKPITDYAPALEYGVYESTATIVHDEPYNYPGTNTPVYNWDRGYFGNITLQYALQQSRNVPAVETLNKVGLNRAKTFLNGLGIDYPSIHYSNAISSNTTESDKKYGASSEKMAAAYAAFANGGTYYKPMYIHKVVFSDGSEKEFSNVGTRAMKETTAYMMTDMMKTVLSYGTGRNAYLAWLPQAGKTGTSNYTDEEIENHIKTSQFVAPDELFAGYTRKYSMAVWTGYSNRLTPLVGNGLTVAAKVYRSMMTYLSEGSNPEDWNIPEGLYRNGEFVFKNGARSTWSSPAPQQPPSTESSSSSSDSSTSQSSSTTPSTNNSTTTNPNNNTQQSNTTPDQQNQNPQPAQP

SEQ ID NO: 13424 - protein, 113 aa, Streptococcus pneumoniae
MERDMASIIFSAKDIFEQEFGREVRGYNKVEVDEFLDDVIKDYETYAALVKSLRQEIADLKEELTRKPKPSPVQAEPLEAAITSSMTNFDILKRLNRLEKEVFGKQILDNSDF

SEQ ID NO: 13425 - protein, 481 aa, Streptococcus pneumoniae
MKQEECQMTKANFGVVGMAVMGRNLALNIESRGYTVAIYNRSKEKTEDVIACHPEKNFVPSYDVESFVNSIEKPRRIMLMVQAGPGTDATIQALLPHLDKGDILIDGGNTFYKDTIRRNEELANSGINFIGTGVSGGEKGALEGPSIMPGGQKEAYELVADVLEEISAKAPEDGKPCVTYIGPDGAGHYVKMVHNGIEYGDMQLIAESYDLMQHLLGLSAEDMAEIFTEWNKGELDSYLIEITADILSRKDDEGQDGPIVDYILDAAGNKGTGKWTSQSSLDLGVPLSLITESVFARYISTYKEERVHASKVLPKPAAFNFEGDKAELIEKIRQALYFSKIISYAQGFAQLRVASKENNWNLPFADIASIWRDGCIIRSRFLQKITDAYNRDADLANLLLDEYFLDVTAKYQQAVRDIVALAVQAGVPVPTFSAAITYFDSYRSADLPANLIQAQRDYFGAHTYQRKDKEGTFHYSWYDEK

SEQ ID NO: 13426 - protein, 317 aa, Streptococcus pneumoniae
MDREPVTVRSYANIAIIKYWGKKKEKEMVPATSSISLTLENMYTETTLSPLPANVTADEFYINGQLQNEVEHAKMSKIIDRYRPAGEGFVRIDTQNNMPTAAGLSSSSSGLSALVKACNAYFKLGLDRSQLAQEAKFASGSSSRSFYGPLGAWDKDSGEIYPVETDLKLAMIMLVLEDKKKPISSRDGMKLCVETSTTFDDWVRQSEKDYQDMLIYLKENDFAKIGELTEKNALAMHATTKTASPAFSYLTDASYEAMDFVRQLREKGEACYFTMDAGPNVKVFCQEKDLEHLSEIFGQRYRLIVSKTKDLSQDDCC

SEQ ID NO: 13427 - protein, 145 aa, Streptococcus pneumoniae
MKLEKHLIKLNKQFSNKEEAICYCGQVLYEGGYVNEDYIEAMIERDKELSVYMGNFIAIPHGTDAAKNDVLKSGITVVQVPRGVDFGNVSNPQVATVLFGIAGIGNEHLEIIQKISIFCADVDNVLKLADAQSKEEVLRLFDAVE

SEQ ID NO: 13428 - protein, 204 aa, Streptococcus pneumoniae
MNLFKNFLKEWGLFLLILSLLALSRIFFWSNVRVEGHSMDPTLADGEILFVVKHLPIDRFDIVVAHEEDGNKDIVKRVIGMPGDTIRYENDKLYINDKETDEPYLADYIKRFKDDKLQSTYSGKGFEGNKGTFFRSIAQKAQAFTVDVNYNTNFSFTVPEGEYLLLGDDRLVSSDSRHVGTFKAKDITGEAKFRFWPITRIGTF

SEQ ID NO: 13429 - protein, 440 aa, Streptococcus pneumoniae
MLELLKSIDAFTWGPPLLILLVGTGVYLTMRLGLLQVLRLPKAFQLIFIQDKGHGDVSSFAALCTALASTVGTGNIIGVATAIKVGGPGALFWMWMAAFFGMATKYAEGLLAIKYRTKDDHGAVAGGPMHYILLGMGEKWRPLADLFAVAGVLVALLGIGTFTQVNSITESIQNTTTISPAITALVLTVFVAIAVFGGLKSISKVSTTVVPFMAIIYILGTLTVIFFNIGKIPGTIALGFTSAFSPLAAVGGFAGASVRMAIQNGVARGVFSNESGLGSAPIAAAAAKTNEPVEQGLISMTGTFIDTLIICTLTGLTILVTGVWSGDLNGVALTQSAFSTVFSHFGPALLTIFLVLFAFTTILGWRYYGERCFEFLFGVRFIWLYRVVFVLMVLLGGFIELNMVWIIADIVNALMALPNLIALLVMSPVVIAETKKYFDK

SEQ ID NO: 13430 - protein, 563 aa, Streptococcus pneumoniae
MNTKELIASELSSIIDSLDQEAILKLLETPKNSEMGDIAFPAFSLAKVERKAPQMIAAELAEKMNSQAFEKVVATGPYVNFFLDKSAISAQVLQAVTTEKEHYADQNIGKQENVVIDMSSPNIAKPFSIGHLRSTVIGDSLSHIFQKIGYQTVKVNHLGDWGKQFGMLIVAYKKWGDEEAVKAHPIDELLKLYVRINAEAENDPSLDEEAREWFRKLENGDEEALALWQWFRDESLVEFNRLYNELKVEFDSYNGEAFYNDKMDAVVDILSEKGLLLESEGAQVVNLEKYGIEHPALIKKSDGATLYITRDLAAALYRKNEYQFAKSIYVVGQEQSAHFKQLKAVLQEMGYDWSDDITHVPFGLVTKEGKKLSTRKGNVILLEPTVAEAVSRAKVQIEAKNPELENKDQVAHAVGVGAIKFYDLKTDRTNGYDFDLEAMVSFEGETGPYVQYAYARIQSILRKADFKPETAGNYSLNDTESWEIIKLIQDFPRIINRAADNFEPSIIAKFAISLAQSFNKYYAHTRILDESPERDSRLALSYATAVVLKEALRLLGVEAPEKM

SEQ ID NO: 13431 - protein, 502 aa, Streptococcus pneumoniae
MSQEKYIMAIDQGTTSSRAIIFNKKGEKVSSSQKEFTQIFPQAGWVEHNANEIWNSVQSVIAGAFIESGVKPNQIEAIGITNQRETTVVWDKKTGLPIYNAIVWQSRQTAPLAEQLKSQGYVEKFHEKTGLIIDAYFSATKVRWILDHVEGAQERAEKGELLFGTIDTWLVWKLTDGAAHVTDYSNAARTMLYNIKELKWDDEILEILNIPKAILPEVRSNSEIYGKTAPFHFYGGEVPISGMAGDQQAALFGQLAFEPGMVKNTYGTGSFIIMNTGEEMQLSENNLLTTIGYGINGKVYYALEGSIFIAGSAIQWLRDGLRMVENSPESEKYARDSHNNDEVYVVPAFTGLGAPYWNQNARGSVFGLTRGTSKEDFIKATLQSIAYQVRDIIDTMQVDTQTAIQVLKVDGGAAMNNFLMQFQADILGIDIARAKNLETTALGAAFLAGLSVGYWKDLDELKLLNETGELFEPSMNESRKEQLYKGWKKAVKATQVFAEVDD

SEQ ID NO: 13432 - protein, 290 aa, Streptococcus pneumoniae
MDKIIKTISESGAFRAFVLDSTETVRTAQEKHQTQASSTVALGRTLIASQILAANEKGNTKLTVKVLGSSSLGAIITVADTKGNVKGYVQNPGVDIKKTATGEVLVGPFVGNGQFLVITDYGTGNPYNSITPLISGEIGEDLAFYLTESQQTPSAVGLNVLLDEEDKVKVAGGFLVQVLPGAKKEEIARFEKRIQEMPAISTLLESDDHIEALLKAIYGDEAYKRLSEEEIRFQCDCSHERFMNALASLPSSDLQEMKEEDHGAEITCQFCQTTYNFDEKDLEELIRDKS

SEQ ID NO: 13433 - protein, 335 aa, Streptococcus pneumoniae
MKRTWRNSFVTNLNTPFMIGNIEIPNRTVLAPMAGVTNSAFRTIAKELGAGLVVMEMVSDKGIQYNNEKTLHMLHIDEGENPVSIQLFGSDEDSLARAAEFIQENTKTDIVDINMGCPVNKIVKNEAGAMWLKDPDKIYSIINKVQSVLDIPLTVKMRTGWADPSLAVENALAAEAAGVSALAMHGRTREQMYTGHADLETLYKVAQALTKIPFIANGDIRTVQEAKQRIEEVGADAVMIGRAAMGNPYLFNQINHYFETGEILPDLTFEDKMKIAYEHLKRLINLKGENVAVREFRGLAPHYLRGTSGAAKLRGAISQASTLAEIEALLQLEKA

SEQ ID NO: 13434 - protein, 450 aa, Streptococcus pneumoniae
MAEVEELRVQPQDILAEQSVLGAIFIDESKLVFVREYIESRDFFKYAHRLIFQAMVDLSDRGDAIDATTVRTILDNQGDLQNIGGLSYLVEIVNSVPTSANAEYYAKIVAEKAMLRRLIAKLTESVNQAYEASQPADEIIAQAEKGLIDVSENANRSGFKNIRDVLNLNFGNLEARSQQTTDITGIATGYRDLDHMTTGLHEEELIILAARPAVGKTAFALNIAQNIGTKLDKTVAIFSLEMGAESLVDRMLAAEGLVESHSIRTGQLTDEEWQKYTIAQGNLANASIYIDDTPGIRITEIRSRSRKLAQETGNLGLILIDYLQLITGTGRENRQQEVSEISRQLKILAKELKVPVIALSQLSRGVEQRQDKRPVLSDIRESGSIEQDADIVAFLYRDDYYERGGEEEEGIPNNKVEVIIEKNRSGARGTVELIFQKEYNKFSSISKREA

SEQ ID NO: 13435 - protein, 150 aa, Streptococcus pneumoniae
MKVIFLADVKGKGKKGEIKEVPTGYAQNFLIKKNLAKEATAQAVGELRGKQKSEEKAHAEMIAEGKAIKAQLEAEETVVEFVEKVGPDGRTFGSITNKKIAEELQKQFGIKIDKRHIQVQAPIRAVGLIDVPVKIYQDITSVINLRVKEG

SEQ ID NO: 13436 - protein, 657 aa, Streptococcus pneumoniae
MKKFYVSPIFPILVGLIAFGVLSTFIIFVNNNLLTVLILFLFVGGYVFLFKKLRVHYTRSDVEQIQYVNHQAEESLTALLEQMPVGVMKLNLSSGEVEWFNPYAELILTKEDGDFDLEAVQTIIKASVGNPSTYAKLGEKRYAVHMDASSGVLYFVDVSREQAITDELVTSRPVIGIVSVDNYDDLEDATSESDISQINSFVANFISEFSEKYMMFSRRVSMDRFYLFTDYTVLEGLMNDKFSVIDAFREESKQRQLPLTLSMGFSYGDGNHDEIGKVALLNLNLAEVRGGDQVVVKENDETKNPVYFGGGSAASIKRTRTRTRAMMTAISDKIRSVDQVFVVGHKNLDMDALGSAVGMQLFASNVIENSYALYDEEQMSPDIERAVSFIEKEGVTKLLSVKDAMGMVTNRSLLILVDHSKTALTLSKEFYDLFTQTIVIDHHRRDQDFPDNAVITYIESGASSASELVTELIQFQNSKKNRLSRMQASVLMAGMMLDTKNFTSRVTSRTFDVASYLRTRGSDSIAIQEIAATDFEEYREVNELILQGCKLGSDVLIAEAKDTKCYDTVVISKAADAMLAMSGIEASFVLAKNTQGFISISARSRSKLNVQRIMEELGGGGHFNLAAAQIKDVTLSEAGEKLTEIVLNEIKEKEKEE

SEQ ID NO: 13437 - protein, 346 aa, Streptococcus pneumoniae
MAEITAKLVKELREKSGAGVMDAKKALVETDGDIEKAIELLREKGMAKAAKKADRVAAEGLTGVYVNGNVAAVIEVNAETDFVAKNAQFVELVNTTAKVIAEGKPANNEEALALIMPSGETLEAAYVSATATIGEKISFRRFALIEKTDAQHFGAYQHNGGRIGVISVVEGGDEALAKQLSMHIAAMKPTVLSYKELDEQFVKDELAQLNHVIDQDNESRAMVNKPALPHLKYGSKAQLTDDVIAQAEADIKAELAAEGKPEKIWDKIIPGKMDRFMLDNTKVDQAYTLLAQVYIMDDSKTVEAYLESVNASVVEFARFEVGEGIEKAANDFEAEVAATMAAALNN

SEQ ID NO: 13438 - protein, 286 aa, Streptococcus pneumoniae
MNCEAVALGSFCELKSRRGKKQKGEILMAVISMKQLLEAGVHFGHQTRRWNPKMAKYIFTERNGIHVIDLQQTVKYADQAYDFMRDAAANDAVVLFVGTKKQAADAVAEEAVRSGQYFINHRWLGGTLTNWGTIQKRIARLKEIKRMEEDGTFEVLPKKEVALLNKQRARLEKFLGGIEDMPRIPDVMYVVDPHKEQIAVKEAKKLGIPVVAMVDTNTDPDDIDVIIPANDDAIRAVKLITAKLADAIIEGRQGEDAVAVEAEFAASETQADSIEEIVEVVEGDNK

SEQ ID NO: 13439 - protein, 264 aa, Streptococcus pneumoniae
MDSMILGRYIPGDSIVHRLDPRSKLLAMMLLILIVFWANNPLTNLILFIATGIFIALSGVSLSFFIQGLKSMFFLIAFTTIFQLFFISNGNVLFEFSFVRITDYALQQAGIIFCRFVLIIFFSTLLTLTTMPLSLASAVEALLAPLKRVKVPVHEIGLMLSMSLRFVPTLMDDTTRIMNAQKARGVDFGEGSIVQKVKAMIPILIPLFATSLKRADSLAIAMEARGYQGGKGRSQYRQLKWTLKDTLTILVILVLGCCLFFLKS

SEQ ID NO: 13440 - protein, 279 aa, Streptococcus pneumoniae
MGIALENVNFIYQEGTPLASAALSDVSLTIEDGSYTALIGHTGSGKSTILQLLNGLLVPSQGSVRVFDTLITSTSKNKDIRQIRKQVGLVFQFAENQIFEETVLKDVAFGPQNFGVSEEDAVKTAREKLALVGIDESLFDRSPFELSGGQMRRVAIAGILAMEPSILVLDEPTAGLDPLGRKELMTLFKKLHQSGMTIVLVTHLMDDVAEYANQVYVMEKGRLVKGGKPSDVFQDVVFMEEVQLGVPKITAFCKRLADRGVSFKRLPIKIEEFKESLNG

SEQ ID NO: 13441 - protein, 275 aa, Streptococcus pneumoniae
MKSIIDVKNLSFRYKENQNYYDVKDITFHVKRGEWLSIVGHNGSGKSTTVRLIDGLLEAESGEIVIDGQRLTEENVWNIRRQIGMVFQNPDNQFVGATVEDDVAFGLENQGLSRQEMKKRVEEALALVGMLDFKKREPARLSGGQKQRVAIAGVVALRPAILILDETTSMLDPEGRKELIGTVKGIRKDYDMTDISITHDLEEVAMSDRVLVMKKGEIESTSSPRELFSRNDLDQIGLDDPFANQLKKSLSQNGYDLPENYLTESELEDKLWELL

SEQ ID NO: 13442 - protein, 181 aa, Streptococcus pneumoniae
MKKEQIPNLLTIGRILFIPIFIFILTIGNSIESHIVAAIIFAVASITDYLDGYLARKWNVVSNFGKFADPMADKLLVMSAFIMLIELGMAPAWIVAVIICRELAVTGLRLLLVETGGTILAAAMPGKIKTFSQMFAIIFLLLHWTLLGQVLLYVALFFTIYSGYDYFKGSAYVFKGTFGSK

SEQ ID NO: 13443 - protein, 427 aa, Streptococcus pneumoniae
MTKVVFEEKYYPAVKEKVYRTRLANGLTVALLPKKEFKEVYGSVTVQFGSVDTFVTEVDGYVKQYPGGIAHFLEHKLFEREDSSDLMSAFTSLGADSNAFTSFTKTNYLFSATDYFLENLDLLDELVTSAHFTEASILTEQDIIQQEREMYQDDPDSCLFFSTLANLYPGTPLATDIVGSEESISQINLTNLQENFTKFYKPVNMSLFLVGNFDVERVQDYFESKELKDSDFQEVAREKLFLQPVKPTDSMRMEVSSPKLAIGVRGKREVSEADCYRHHILLKLLFAMMFGWTSDRFQKCYESGKIDASLSLEVEITSRFHFVMLTIDTKEPVALSHQFRKAIRNFTKDLDITEEHLDIIKREMFGEFFSSMNSLEFIATQYDAFENGETIFDLPKILQEITLEDVLDAGHHLIDDGDIVDFTIFPS

SEQ ID NO: 13444 - protein, 341 aa, Streptococcus pneumoniae
MTKPIILTGDRPTGKLHIGHYVGSLKNRVLLQEEDKYDMFVFLADQQALTDHAKDPQTIVESIGNVALDYLAVGLDPNKSTIFIQSQIPELAELSMYYMNLVSLARLERNPTVKTEISQKGFGESIPTGFLVYPIAQAADITAFKANYVPVGTDQKPMIEQTREIVRSFNNAYNCDVLVEPEGIYPENERAGRLPGLDGNAKMSKSLNNGIYLADDADTLRKKVMSMYTDPDHIRVEDPGKIEGNMVFHYLDVFGRPEDAQEIADMKERYQRGGLGDVKTKRYLLEILERELGPIRERRIEFAKDMGEVYNMIQKGSERAREVAGQTLSEVKGAMGLHYFN

SEQ ID NO: 13445 - protein, 454 aa, Streptococcus pneumoniae
MGNEKLYSIMKEKDAIYMKEDFSDEDGVRAAELEGEFAELGGWEAESEASQLLQNLNIPEELHYQNMSELANGEKVKVLLAKALFGKPDVLLLDEPTNGLDIQSITWLEDFLIDFDNTVIVVSHDRHFLNKVCTHMADLDFGKIKLYVGNYDFWKESSELAAKLLADRNAKAEEKIKQLQEFVARFSANASKSRQATSRKKMLDKIELEEIVPSSRKYPFINFKAEREIGNDLLTVENLTVKIDGETILDNISFILRPDDKTALIGQNDIQTTALIRAIMGDIDYEGTVKWGVTTSQSYLPKDNSADFAGGESILDWLRQFASKEEDDNTFLRGFLGRMLFSGDEVNKPVNVLSGGEKVRVMLSKLMLLKSNVLVLDDPTNHLDLESISSLNDGLKNFKESIIFASHDHEFIQTLANHIIVLSKNGVIDRIDETYDEFLENAEVQAKVKELWKD

SEQ ID NO: 13446 - protein, 378 aa, Streptococcus pneumoniae
MIHFSINKNLFLQALNITKRAISSKNAIPILSTVKIDVTNEGVTLIGSNGQISIENFISQKNEDAGLLITSLGSILLEASFFINVVSSLPDVTLDFKEIEQNQIVLTSGKSEITLKGKDSEQYPRIQEISASTPLILETKLLKKIINETAFAASTQESRPILTGVHFVLSQHKELKTVATDSHRLSQKKLTLEKNSDDFDVVIPSRSLREFSAVFTDDIETVEIFFANNQILFRSENISFYTRLLEGNYPDTDRLIPTDFNTTITFNVVNLRQSMERARLLSSATQNGTVKLEIKDGVVSAHVHSPEVGKVNEEIDTDQVTGEDLTISFNPTYLIDSLKALNSEKVTISFISAVRPFTLVPADTDEDFMQLITPVRTN

SEQ ID NO: 13447 - protein, 374 aa, Streptococcus pneumoniae
MRNMALTAGIVGLPNVGKSTLFNAITKAGAEAANYPFATIDPNVGMVEVPDERLQKLTEMITPKKTVPTTFEFTDIAGIVKGASKGEGLGNKFLANIREVDAIVHVVRAFDDENVMREQGREDAFVDPLADIDTINLELILADLESVNKRYARVEKMARTQKDKESVAEFNVLQKIKPVLEDGKSARTIEFTDEEQKVVKGLFLLTTKPVLYVANVDEDVVSEPDSIDYVKQIREFAATENAEVVVISARAEEEISELDDEDKKEFLEAIGLTESGVDKLTRAAYHLLGLGTYFTAGEKEVRAWTFKRGMKAPQAAGIIHSDFEKGFIRAVTMSYEDLVKYGSEKAVKEAGRLREEGKEYIVQDGDIMEFRFNV

SEQ ID NO: 13448 - protein, 1169 aa, Streptococcus pneumoniae
MVTLLDLFSENDQIKKWHQNLTDKKRQLILGLSTSTKALAIASSLEKEDRIVLLTSTYGEAEGLVSDLISILGEELVYPFLVDDAPMVEFLMSSQEKIISRVEALRFLTDSSKKGILVCNIAASRLILPSPNAFKDSIVKISVGEEYDQHAFIHQLKENGYRKVTQVQTQGEFSLRGDILDIFEISQLEPCRIEFFGDEIDGIRSFEVETQLSKENKTELTIFPASDMLLREKDYQRGQSALEKQISKTLSPILKSYLEEILSSFHQKQSHADSRKFLSLCYDKTWTVFDYIEKDTPIFFDDYQKLMNQYEVFERELAQYFTEELQNSKAFSDMQYFSDIEQIYKKQSPVTFFSNLQKGLGNLKFDKIYQFNQYPMQEFFNQFSFLKEEIERYKKMDYTIILQSSNSMGSKTLEDMLEEYQIKLDSRDKTSICKESVNLIEGNLRHGFHFVDEKILLITEHEIFQKKLKRRFRRQHVSNAERLKDYNELEKGDYVVHHIHGIGQYLGIETIEIKEIHRDYVSVQYQNGDQISIPVEQIHLLSKYISSDGKAPKLNKLNDGHFKKAKQKVKNQVEDIADDLIKLYSERSQLKGFAFSADDDDQDAFDDAFPYVETDDQLRSIEEIKRDMQASQPMDRLLVGDVGFGKTEVAMRAAFKAVNDHKQVVILVPTTVLAQQHYTNFKERFQNFAVNVDVLSRFRSKKEQTATLEKLKNGQVDILIGTHRVLSKDVVFADLGLMIIDEEQRFGVKHKETLKELKKQVDVLTLTATPIPRTLHMSMLGIRDLSVIETPPTNRYPVQTYVLEKNDSVIRDAVLREMERGGQGYYLYNKVDTIVQKVSELQELIPEASIGYVHGRMSEVQLENTLLDFIEGQYDILVTTTIIETGVDIPNANTLFIENADHMGLSTLYQLRGRVGRSNRIAYAYLMYRPEKSISEVSEKRLEAIKGFTELGSGFKIAMRDLSIRGAGNLLGKSQSGFIDSVGFELYSQLLEEAIAKRNGNANANTRTKGNAELILQIDAYLPDTYISDQRHKIEIYKKIRQIDNRVNYEELQEELIDRFGEYPDVVAYLLEIGLVKSYLDKVFVQRVERKDNKITIQFEKVTQRLFLAQDYFKALSVTNLKAGIAENKGLMELVFDVQNKKDYEILEGLLIFGESLLEIKESKEKNSI

SEQ ID NO: 13449 - protein, 88 aa, Streptococcus pneumoniae
MRLDKYLKVSRIIKRRTVAKEVADKGRIKVNGILAKSSTDLKVNDQVEIRFGNKLLLVKVLEMKDSTKKEDAAGMYEIISETRVEENV

SEQ ID NO: 13450 - protein, 236 aa, Streptococcus pneumoniae
MKKYQQLFKQIQETIQNETYAVGDFLPSEHDLMEQYQVSRDTVRKALSLLQEEGLIKKIRGQGSQVVKEETVNFPVSNLTSYQELVKELGLRSKTNVVSLDKIIIDKKSSLITGFPEFRMVWKVVRQRVVDDLVSVLDTDYLDMELIPNLTRQIAEQSIYSYIENGLKLLIDYAQKEITIDHSSDRDKILMDIGKDPYVVSIKSKVYLQDGRQFQFTESRHKLEKFRFVDFAKRKK

SEQ ID NO: 13451 - protein, 264 aa, Streptococcus pneumoniae
MDNRPIGFLDSGVGGLTVVRELMRQLPHEEIVYIGDSARAPYGPRPAEQIREYTWQLVNFLLTKDVKMIVIACNTATAVVWEEIKAQLDIPVLGVILPGASAAIKSSQGGKIGVIGTPMTVQSDIYRQKIHDLDPDLQVESLACPKFAPLVESGALSTSVTKKVVYETLRPLVGKVDSLILGCTHYPLLRPIIQNVMGPKVQLIDSGAECVRDISVLLNYFEINRGRDAGPLHHRFYTTASSQSFAQIGEEWLEKEIHVEHVEL

SEQ ID NO: 13452 - protein, 336 aa, Streptococcus pneumoniae
MAGKRDSCGACRIMTNKIYEYKDDQNWYVGSYSIFGGVNSLSDYKADFPLFEFSKIFGDEEYGFPLSVTVLRYGSTYRLFSFVVDMLNQEMGRNLEVIQRHGALLLVENGQLLYVELPKEGVNVHDFFETSKVRETLLIATRNEGKTKEFRAIFDKLGYDVENLNDYPDLPEVAETGMTFEENARLKAETISQLTGKMVLADDSGLKVDVLGGLPGVWSARFAGVGATDRENNAKLLHELAMVFELKDRSAQFHTTLVVASPNKESLVVEADWSGYINFEPKGENGFGYDPLFLVGETGESSAELTLEEKNSQSHRALAVKKLLEVFPSWQSKPSL

SEQ ID NO: 13453 - protein, 240 aa, Streptococcus pneumoniae
MRINKYIAHAGVASRRKAEELIKQGLVTVNGQVVRELATTIKSGDKVEVEGQPIYNEEKVYYLLNKPRGVISSVTDDKGRKTVVDLLPNVKERIYPVGRLDWDTSGVLILTNDGDFTDEMIHPRNEIDKVYVARVKGVANKDNLRPLTRGLEIDGKKTKPAVYEILKVDPVKNRSVVQLTIHEGRNHQVKKMFEAVGLQVDKLSRTRFGHLDLTGLRPGESRRLNKKEISQLHTMAVTKK

SEQ ID NO: 13454 - protein, 321 aa, Streptococcus pneumoniae
MKTSLKLYFTALVASFLLLLGACSTNSSTSQTETSSSAPTEITIKSSLDEVKLSKVPEKIVTFDLGAADTIRALGFEKNIVGMPTKTVPTYLKDLVGTVKNVGSMKEPDLEAIAALEPDLIIASPRTQKFVDKFKEIAPTVLFQASKDDYWTSTKANIESLASAFGETSTQKAKEELAKLDKSIQEVATKNESSDKKALAILLNEGKMAAFGAKSRFSFLYQTLKFKPTDTKFEDSRHGQEVSFESVKEINPDILFVINRTLAIGGDNSSNDGVLENALIAETPAAKNGKIIQLTPDLWYLSGGGLESTKLMIEDIQKALK

SEQ ID NO: 13455 - protein, 486 aa, Streptococcus pneumoniae
MSKDIRVRYAPSPTGLLHIGNARTALFNYLYARHHGGTFLIRIEDTDRKRHVEDGERSQLENLRWLGMDWDESPESHENYRQSERLDLYQKYIDQLLAEGKAYKSYVTEEELAAERERQEVAGETPRYINEYLGMSEEEKAAYIAEREAAGIIPTVRLAVNESGIYKWHDMVKGDIEFEGGNIGGDWIIQKKDGYPTYNFAVAIDDHDMQISHVIRGDDHIANTPKQLMVYEALGWEAPEFGHMTLIINSETGKKLSKRDTNTLQFIEDYRKKGYLPEAVFNFIALLGWNPGGEDEIFSREELIKLFDENRLSKSPAAFDQKKLDWMSNDYIKNADLETIFEMAKPFLEEAGRLTDKAEKLVELYKPQMKSVDEIIPLTDLFFSDFPELTEAEREVMTGETVPTVLEAFKAKLEAMTDDKFVTENIFPQIKAVQKETGIKGKNLFMPIRIAVSGEMHGPELPDTIFLLGREKSIQHIENMLKEISK

SEQ ID NO: 13456 - protein, 324 aa, Streptococcus pneumoniae
MKGRGMKLSHYLIGLLLLLVFLSISIGTSDFSWGKLFDFDQQTWLLFQESRLPRTISILLTASSMSMAGLLMQTITQNQFAAPSTVGTTEAAKLGMVLSLFVFPSASLTQKMLFAFVSSIVFTLFFLAFMTIFTVKERWMLPLIGIIYSGIIGSVTEVIAYRFNLVQSMTAWTQGSFSMIQTHQYEWLFLGLIILITVWKLSQTFTIMNLGKETSESLGISYSLLEKLALFLVALTTSVTMITVGGLPFLGVIVPNLVRKRYGDNLSQTKLMVALVGANLVLACDILSRVLIRPYELSVSLLLGIIGSLVFILLLWRGGRKDAD

SEQ ID NO: 13457 - protein, 338 aa, Streptococcus pneumoniae
MEKQTVAVLGPGSWGTALSQVLNDNGHEVRIWGNLPEQINEINTHHTNKHYFKDVVLDENIIAYTDLAETLKNVDAILFVVPTKVTRLVAQQVAQTLDHKVIIMHASKGLEPDSHKRLSTILEEEIPEHLRSDIVVVSGPSHAEETIVRDLTLITAASKDLQTAQYVQELFSNHYFRLYTNTDVIGVETAGALKNIIAVGAGALHGLGFGDNAKAAIIARGLAEITRLGVALGASPLTYSGLSGVGDLIVTGTSIHSRNWRAGDALGRGESLADIEANMGMVIEGISTTRAAYELAQELGVYMPITQAIYQVIYHGTNIKDAIYDIMNNEFKAENEWS

SEQ ID NO: 13458 - protein, 583 aa, Streptococcus pneumoniae
MQNKQEQWTVLKRLMSYLKPYGLLTFLALSFLLATTVIKSVIPLVASHFIDQYLSNLNQLAVTVLLVYYGLYILQTVVQYVGNLLFARVSYSIVRDIRRDAFANMEKLGMSYFDKTPAGSIVSRLTNDTETISDMFSGILSSFISAVFIFLTTLYTMLVLDFRLTALVLLFLPLIFLLVNLYRKKSVKIIEKTRSLLSDINSKLAENIEGIRIIQAFNQEKRLQAEFDEINQEHLAYANRSVALDALFLRPAMSLLKLLGYAVLMTYFGYRGLSIGITAGTMYAFIQYINRLFDPLIEVTQNFSTLQTSMVSAGRVFALIDERTYEPLQENGQAKVKEGNIRFEHVCFSYDGKHPILDDISFSVNKGETIAFVGHTGSGKSSIINVLMRFYEFQSGRVLLDDVDIRDFSQEELRKNIGLVLQEPFLYHGTIKSNIAMYQEISDEQVQAAAAFVDADSFIQELPQGYDSPVSERGSSFSTGQRQLLAFARTVASQPKILILDEATANIDSETESLVQASLAKMRQGRTTIAIAHRLSTIQDANCIYVLDKGRIIESGTHEELLTLGGTYHKMYSLQAGAMAYTL

SEQ ID NO: 13459 - protein, 334 aa, Streptococcus pneumoniae
MKEIIEKLAKFENLSGVEMTDVIERIVTGRVTEAQIASLLLALKMKGETPEERTAIAQVMRGHAQHIPTEIHDAMDNCGTGGDKSFSFNISTTAAFVLAGGGIHMAKHGNRSISSKSGSADVLEALGINLDLKPAELGKVFDKTGIVFLFAKNMHPAMKYIMPARLELGIPTIMNLTGPLIHPMALETQLLGISRPELLESTAQVLKNMGRKRAIVVAGPEGLDEAGLNGTTKIALLENGEISLSSFTPEDLGMEGYAMEDIRGGNAQENAEILLSVLKNEASPFLETTVLNAGLGFYANGKIDSIKEGVALARQVIARGKALEKLRLLQEYQK

SEQ ID NO: 13460 - protein, 67 aa, Streptococcus pneumoniae
MSVEEKLNQAKGSIKEGVGKAIGDEKMEKEGAAEKVVSKVKEVAEDAKDAVEGAVEGVKNMLSGDDK

SEQ ID NO: 13461 - protein, 247 aa, Streptococcus pneumoniae
MQQYFVKGSAISPVTIEDKETSKHMFQVMRLKEEDEVTLVFDDGIKRLARVLDMENRQFELVQELNDNVELPVQVTIASGFPKGDKLEFIAQKVTELGASQIWAFPADWSVAKWDGKKLGKKVEKLEKIALGAAEQSKRNIVPSIKLFEKKADFLAQLDQFDSIIVAYEESAKEGEAAALLQAVTGLETGAKLLFIFGPEGGLSPAEIESFEAKGAVLAGLGPRILRAETAPLYALSALSVLVELEK

SEQ ID NO: 13462 - protein, 418 aa, Streptococcus pneumoniae
MHIFDELKERGLIFQTTDEEALRKALEEGQVSYYTGYDPTADSLHLGHLVAILTSRRLQLAGHKPYALVGGATGLIGDPSFKDAERSLQTKDTVDGWVKSIQGQLSRFLDFENGENKAVMVNNYDWFGSISFIDFLRDIGKYFTVNYMMSKESVKKRIETGISYTEFAYQIMQGYDFFVLNQDHNVTLQIGGSDQWGNMTAGTELLRRKADKTGHVITVPLITDATGKKFGKSEGNAVWLNPEKTSPYEMYQFWMNVMDADAVRFLKIFTFLSLDEIEDIRKQFEAAPHERLAQKVLAREVVTLVHGEEAYKEALNITEQLFAGNIKNLSVKELKQGLRGVPNYQVQADENNNIVELLVSSGIVNSKRQAREDVQNGAIYVNGDRIQELDYVLSDADKLENELTVIRRGKKKYFVLTY

SEQ ID NO: 13463 - protein, 537 aa, Streptococcus pneumoniae
MEIMSLAIAVFAVIIGLVIGYVSISAKMKSSQEAAELMLLNAEQEATNLRGQAEREADLLVNEAKRESKSLKKEALLEAKEEARKYREEVDAEFKSERQELKQIESRLTERATSLDRKDDNLTSKEQTLEQKEQSISDRAKNLDAREEQLEEVERQKEAELERIGALSQAEARDIILAQTEENLTREIASRIREAEQEVKERSDKMAKDILVQAMQRIAGEYVAESTNSTVHLPDDTMKGRIIGREGRNIRTFESLTGVDVIIDDTPEVVTLSGFDPIRREIARMTMEMLLKDGRIHPARIEELVEKNRQEIDNKIREYGEAAAYEIGAPNLHPDLMKIMGRLQFRTSYGQNVLRHSIEVAKLAGIMASELGENAALARRAGFLHDIGKAIDHEVEGSHVEIGMELARKYKEPPVVVNTIASHHGDVEAESVIAVIVAAADALSAARPGARSESLESYIKRLHDLEEIANGFEGVQTSFALQAGREIRIMVNPGKIKDDKVTILAHKVRKKIENNLDYPGNIKVTVIRELRAVDYAK

SEQ ID NO: 13464 - protein, 460 aa, Streptococcus pneumoniae
MIEKKKYWRKNMSHIKFDYSKVLDKFVAPHEVEYMQSQVTAADELIRKGTGAGSDFLGWLDLPEKYDREEFDRILKAAEQIKSDSDVLVVIGIGGSYLGAKAAIDFLNHHFANLQTKEERKAPQILYAGNSISSTYLADLVEYVADKDFSVNVISKSGTTTEPAIAFRVFKELLVKKYGQEEANKRIYATTDRQKGAVKVEADANGWGTFVVPDDIGGRFSVLTAVGLLPIAASGADIKALMEGANAARKDYTSDKISENEAYQYAAVRNILYRKGYATEILVNYEPSLQYFSEWWKQLAGESEGKDQKGIYPTSANFSTDLHSLGQFIQEGTRIMFETVVRVDKPRKNVLIPTLEEDLDGLGYLQGKDVDFVNKKATDGVLLAHTDGDVPNMYVTLPEQDAFTLGYTIYFFELAIDLSGYLNAINPFDQPGVEAYKRNMFALLGKPGFEELSKELNARL

SEQ ID NO: 13465 - protein, 659 aa, Streptococcus pneumoniae
MIQIGKIFAGRYRIVKQIGRGGMADVYLAKDLILDGEEVAVKVLRTNYQTDPIAVARFQREARAMADLDHPHIVRITDIGEEDGQQYLAMEYVAGLDLKRYIKEHYPLSNEEAVRIMGQILLAMRLAHTRGIVHRDLKPQNILLTPDGTAKVTDFGIAVAFAETSLTQTNSMLGSVHYLSPEQARGSKATVQSDIYAMGIIFYEILTGHIPYDGDSAVTIALQHFQNPLPSVIAENSSVPQALENVIIKATAKKLTNRYRSVSEMYVDLSSSLSYNRRNESKLIFDETSKADTKTLPKVSQSTLTSIPKVQAQTEHKSIKNPSQAVTEETYQPQAPKKHRFKMRYLILLASLVLVAASLIWILSRTPATIAIPDVAGQTVAEAKATLKKANFEIGEEKTEASEKVEEGRIIRTDPGAGTGRKEGTKINLVVSSGKQSFQISNYVGRKSSDVIAELKEKKVPDNLIKIEEEESNESEAGTVLKQSLPEGTTYDLSKATQIVLTVAKKATTIQLGNYIGRNSTEVISELKQKKVPENLIKIEEEESSESEPGTIMKQSPGAGTTYDVSKPTQIVLTVAKKVTSVAMPSYIGSSLEFTKNNLIQIVGIKEANIEVVEVTTAPAGSVEGMVVEQSPRAGEKVDLNKTRVKISIYKPKTTSATP

SEQ ID NO: 13466 - protein, 424 aa, Streptococcus pneumoniae
MKISWNGFSKKSYQERLELLKAQALLSPERQASLEKDEQMSVTVADQLSENVVGTFSLPYSLVPEVLVNGQEYTVPYVTEEPSVVAAASYASKIIKRAGGFTAQVHQRQMIGQVALYQVANPKLAQEKIASKKAELLELANQAYPSIVKRGGGARDLHVEQIKGEPDFLVVYIHVDTQEAMGANMLNTMLEALKPVLEELSQGQSLMGILSNYATDSLVTASCRIAFRYLSRQKDQGREIAEKIALASQFAQADPYRAATHNKGIFNGIDAILIATGNDWRAIEAGAHAFASRDGRYQGLSCWTLDLEREELVGEMTLPMPVATKGGSIGLNPRVALSHDLLGNPSARELAQIIVSIGLAQNFAALKALVSTGIQQGHMKLQAKSLALLAGASESEVAPLVERLISDKTFNLETAQRYLENLRS

SEQ ID NO: 13467 - protein, 627 aa, Streptococcus pneumoniae
MNNQEIAKKVIDALGGRENVNSVAHCATRLRVMVKDEEKINKEVIENLEKVQGAFFNSGQYQIIFGTGTVNKMYDEVVVLGLPTSSKDDMKAEVAKQGNWFQRAIRTFGDVFVPIIPVIVATGLFMGVRGLFNALEMPLPGDFATYTQILTDTAFIILPGLVVWSTFRVFGGNPAVGIVLGMMLVSGSLPNAWAVAQGGEVTAMNFFGFIPVVGLQGSVLPAFIIGVVGAKFEKAVRKVVPDVIDLLVTPFVTLLVMSILGLFVIGPVFHVVENYILIATKAILSMPFGLGGFLIGGVHQLIVVSGVHHIFNLLEVQLLAADHANPFNAIITAAMTAQGAATVAVGVKTKNPKLKTLAFPAALSAFLGITEPAIFGVNLRFRKPFFLSLIAGAIGGGLASILGLAGTGNGITIIPGTMLYVGNGQLPQYLLMVAVSFALGFALTYMFGYEDEVDATAAAKQAEVAEEKEEVAPAALQNETLVTPIVGDVVALADVNDPVFSSGAMGQGIAVKPSQGVVYALADAEVSIAFPTGHAFGLKTRNGAEVLIHVGIDTVSMNGDGFEAKVAQGNKVKAGDVLGTFDSNKIAAAGLDDTTMVIVTNTADYASVAPVATGSVSKGDAVIEVKI

SEQ ID NO: 13468 - protein, 297 aa, Streptococcus pneumoniae
MLEVRSLEKSFGSKQVLFGIDFQARPGRILGLVGKNGAGKTTIFHSILKFLEYQGEIGLDGQDIRQETYARIGYLPEERSLMPKLTVLEQVRYLATLKGMDAKEVKEKLPQWMKRLKVKGKLTDKIKSLSKGNQQKIQLIITLIHEPDLIILDEPFSGLDPVNTELLKQVIFQEKERGATIIFSDHVMTNVEELCDDILMIRDGRVVLHGPVQDVRNQYGKTRLFVSSERSKEELENLPHVKQVSLTKQGSWKLILEDESAGRELFPILTQGQYIATFDQQAPTIDEIFKLESGVEV

SEQ ID NO: 13469 - protein, 240 aa, Streptococcus pneumoniae
MIILKEFKPMSLLAFENVSKSYGATPALENVSLDIPAGKIVGLLGPNGSGKTTLIKLINGLLQPDQGRVLINDMDPSPATKAVVAYLPDTTYLNEQMKVKEALTYFKTFYKDFNLERAHHLLADLGIDENSRLKKLSKGNKEKVQLILVMSRDARLYVLDEPIGGVDPAARAYILNTIINNYSPTSTVLISTHLISDIEPILDEIVFLKDGKVVRQGNVDDIRYESGESIDQLFRQEFKA

SEQ ID NO: 13470 - protein, 121 aa, Streptococcus pneumoniae
MSWTFDNKKPIYLQIMEKIKLQIVSHTLEPNQQLPTVRELASEAGVNPNTIQRALSDLEREGFVYSKRTTGRFVTKDKELIAQSRKQLSEEELEHFVSSMTHFGYEKEELPGVVSDYIKGV

SEQ ID NO: 13471 - protein, 837 aa, Streptococcus pneumoniae
MANILKTIIENDKGEIRRLEKMADKVFKYEDQMAALTDDQLKAKTVEFKERYQNGESLDSLLYEAFAVVREGAKRVLGLFPYKVQVMGGIVLHHGDVPEMRTGEGKTLTATMPVYLNALSGKGVHVVTVNEYLSERDATEMGELYSWLGLSVGINLATKSPMEKKEAYECDITYSTNSEIGFDYLRDNMVVRAENMVQRPLNYALVDEVDSILIDEARTPLIVSGANAVETSQLYHMADHYVKSLNKDDYIIDVQSKTIGLSDSGIDRAESYFKLENLYDIENVALTHFIDNALRANYIMLLDIDYVVSEEQEILIVDQFTGRTMEGRRYSDGLHQAIEAKEGVPIQDETKTSASITYQNLFRMYKKLSGMTGTGKTEEEEFREIYNIRVIPIPTNRPVQRIDHSDLLYASIESKFKAVVEDVKARYQKGQPVLVGTVAVETSDYISKKLVAAGVPHEVLNAKNHYREAQIIMNAGQRGAVTIATNMAGRGTDIKLGEGVRELGGLCVIGTERHESRRIDNQLRGRSGRQGDPGESQFYLSLEDDLMKRFGSERLKGIFERLNMSEEAIESRMLTRQVEAAQKRVEGNNHDTRKQVLQYDDVMREQREIIYAQRYDVITADRDLAPEIQAMIKRTIERVVDGHARAKQDEKLEAILNFAKYNLLPEDSITMEDLSGLSDKAIKEELFQRALKVYDSQVSKLRDEEAVKEFQKVLILRVVDNKWTDHIDALDQLRNAVGLRGYAQNNPVVEYQAEGFRMFNDMIGSIEFDVTRLMMKAQIHEQERPQAERHISTTATRNIAAHQASMPEDLDLNQIGRNELCPCGSGKKFKNCHGKRQ

SEQ ID NO: 13472 - protein, 122 aa, Streptococcus pneumoniae
MRMIVGHGIDIEELASIESAVTRHEGFAKRVLTAQEMERFTSLKGRRQIEYLAGRWSAKEAFSKAMGTGISKLGFQDLEVLNNERGAPYFSQAPFSGKIWLSISHTDQFVTASVILEENHES

SEQ ID NO: 13473 - protein, 374 aa, Streptococcus pneumoniae
MSFWRKIMKASPHRPTKALIHLGAIRQNIQQMGAHIPQGTLKLAVVKANAYGHGAVAVAKAIQDDVDGFCVSNIDEAIELRQAGLSKPILILGVSEIEAVALAKEYDFTLTVAGLEWIQALLDKEVDLTGLTVHLKIDSGMGRIGFREASEVEQAQDLLQQHGVCVEGIFTHFATADEESDDYFNAQLERFKTILASMKEVPELVHASNSATTLWHVETIFNAVRMGDAMYGLNPSGAVLDLPYDLIPALTLESALVHVKTVPAGACMGYGATYQADSEQVIATVPIGYADGWTRDMQNFSVLVDGQACPIVGRVSMDQITIRLPKLYPLGTKVTLIGSNGDKEITATQVATYRVTINYEVVCLLSDRIPREYY

SEQ ID NO: 13474 - protein, 510 aa, Streptococcus pneumoniae
MRGSFMFKVLQKVGKAFMLPIAILPAAGLLLGIGGALSNPTTIATYPILDNSIFQSIFQVMSSAGEVVFSNLSLLLCVGLCIGLAKRDKGTAALAGVTGYLVMTATIKALVKLFMAEGSAIDTGVIGALVVGIVAVYLHNRYNNIQLPSALGFFGGSRFVPIVTSFSSILIGFVFFVIWPPFQQLLVSTGGYISQAGPIGTFLYGFLMRLSGAVGLHHIIYPMFWYTELGGVETVAGQTVVGAQKIFFAQLADPAHSGLFTEGTRFFAGRFSTMMFGLPAACLAMYHSVPKNRRKKYAGLFFGVALTSFITGITEPIEFMFLFVSPVLYVVHAFLDGVSFFIADVLNISIGNTFSGGVIDFTLFGILQGNAKTNWVLQIPFGLIWSVLYYIIFRWFITQFNVLTPGRGEEVDSKEISESADSTSNTADYLKQDSLQIIRALGGSNNIEDVDACVTRLRVAVKEVNQVDKALLKQIGAVDVLEVKGGIQAIYGAKAILYKNSINEILGVDD

SEQ ID NO: 13475 - protein, 294 aa, Streptococcus pneumoniae
MTYYVAIDIGGTNIKYGLVDQEGQLLESHEMPTEAHKGGPHILQKTKDIVASYLEKGPVAGVAISSAGMVDPDKGEIFYAGPQIPNYAGTQFKKEIEESFTIPCEIENDVNCAGLAEAVSGSGKGASVTLCLTIGTGIGGCLIMDRKVFHGFSNSACEVGYMHMQDGAFQDLASTTALVKYVAEAHGEDVDQWNGRRIFKEATEGNKICMEGIDRMVDYLGKGLANICYVANPEVVILGGGIMGQEAILKPKIRTALKEALVPSLAEKTRLEFAHHQNTAGMLGAYYHFKTKQS

SEQ ID NO: 13476 - protein, 283 aa, Streptococcus pneumoniae
MDKPDIATIIDSHFEEMTDPEQEIARYFLQAETITDDLSSQQVTQKLHISQAALTRFAKKCGFTGYREFIFQYQHQAENQANQVSKHSPLTKRVLRSYSNMREQTQDLIDEIQLERIAQLIEDAERIYFFGTGSSGLVAREMKLRFMRLGVVCEALTDQDGFAWTTSIMDENCLVLGFSLSGSTPSILDSLLDAKEMGAKTVLFTSVPNKNSQTYTETVLVATHSQPSYIQRISAQLPMLFFIDLIYAYFLEINRESKEKIFNSYWENKKLNGYRRQKRVRKS

SEQ ID NO: 13477 - protein, 685 aa, Streptococcus pneumoniae
MRLICMRKFNSHSIPIRLNLLFSIVILLFMTIIGRLLYMQVLNKDFYEKKLASASQTKITSSSARGEIYDASGKPLVENTLKQVVSFTRSNKMTATDLKETAKKLLTYVSISSPNLTERQLADYYLADPEIYKKIVEALPSEKRLDSDGNRLSESELYNNAVDSVQTSQLNYTEDEKKEIYLFSQLNAVGNFATGTIATDPLNDSQVAVIASISKEMPGISISTSWDRKVLETSLSSIVGSVSSEKAGLPAEEAEAYLKKGYSLNDRVGTSYLEKQYEETLQGKRSVKEIHLDKYGNMESVDTIEEGSKGNNIKLTIDLAFQDSVDALLKSYFNSELENGGAKYSEGVYAVALNPKTGAVLSMSGIKHDLKTGELTPDSLGTVTNVFVPGSVVKAATISSGWENGVLSGNQTLTDQSIVFQGSAPINSWYTQAYGSFPITAVQALEYSSNTYMVQTALGLMGQTYQPNMFVGTSNLESAMEKLRSTFGEYGLGTATGIDLPDESTGFVPKEYSFANYITNAFGQFDNYTPMQLAQYVATIANNGVRVAPRIVEGIYGNNDKGGLGDLIQQLQPTEMNKVNISDSDMSILHQGFYQVAHGTSGLTTGRAFSNGALVSISGKTGTAESYVADGQQATNTNAVAYAPSDNPQIAVAVVFPHNTNLTNGVGPSIARDIINLYQKYHPMN

SEQ ID NO: 13478 - protein, 457 aa, Streptococcus pneumoniae
MKLTIHEIAQVVGAKNDISIFEDTQLEKAEFDSRLIGTGDLFVPLKGARDGHDFIETAFENGAAVTLFEKEVSNHPYILVDDVLTAFQSLASYYLEKTTVDVFAVTGSNGKTTTKDMLAHLLSTRYKTYKTQGNYNNEIGLPYTVLHMPEGTEKLVLEMGQDHLGDIHLLSELARPKTAIVTLVGEAHLAFFKDRSEIAKGKMQIADGMASGSLLLAPADPIVEDYLPIDKKVVRFGQGAELEITDLVERKDSLTFKANFLEQALDLPVTGKYNATNAMIASYVALQEGVSEEQIRLAFQHLELTRNRTEWKKAANGADILSDVYNANPTAMKLILETFSAIPANEGGKKIAVLADMKELGDQSVQLHNQMILSLSPDVLDIVIFYGEDIAQLAQLASQMFPIGHVYYFKKTEDQDQFEDLVKQVKESLGAHDQILLKGSNSMNLAKLVESLENEDK

SEQ ID NO: 13479 - protein, 419 aa, Streptococcus pneumoniae
MTFSFDTAAAQGAVIKVIGVGGGGGNAINRMVDEGVTGVEFIAANTDVQALSSTKAETVIQLGPKLTRGLGAGGQPEVGRKAAEESEETLTEAISGADMVFITAGMGGGSGTGAAPVIARIAKDLGALTVGVVTRPFGFEGSKRGQFAVEGINQLREHVDTLLIISNNNLLEIVDKKTPLLEALSEADNVLRQGVQGITDLITNPGLINLDFADVKTVMANKGNALMGIGIGSGEERVVEAARKAIYSPLLETTIDGAEDVIVNVTGGLDLTLIEAEEASQIVNQAAGQGVNIWLGTSIDESMRDEIRVTVVATGVRQDRVEKVVAPQARSATNYRETVKPAHSHGFDRHFDMAETVELPKQNPRRLEPTQASAFGDWDLRRESIVRTTDSVVSPVERFEAPISQDEDELDTPPFFKNR

SEQ ID NO: 13480 - protein, 266 aa, Streptococcus pneumoniae
MRNRMPITSLEIKDKTFGTRFRGFDPEEVDEFLDIVVRDYEDLVRANHDKNLRIKSLEERLSYFDEIKDSLSQSVLIAQDTAERVKQAAHERSNNIIHQAEQDAQRLLEEAKYKANEILRQATDNAKKVAVETEELKNKSRVFHQRLKSTIESQLAIVESSDWEDILRPTATYLQTSDEAFKEVVSEVLGEPIPAPIEEEPIDMTRQFSQAEMEELQARIEVADKELSEFEAQIKQEVETPTPVVSPQVEEEPLLIQLAQCMKNQK

SEQ ID NO: 13481 - protein, 930 aa, Streptococcus pneumoniae
MKLKDTLNLGKTEFPMRAGLPTKEPVWQKEWEYAKLYQRRQELNQGKPHFTLHDGPPYANGNIHVGHAMNKISKDIIVRSKSMSGFYAPFIPGWDTHGLPIEQVLSKQGVKRKEMDLVEYLKLCREYALSQVDKQREDFKRLGVSGDWENPYVTLTPDYEAAQIRVFGEMANKGYIYRGAKPVYWSWSSESALAEAEIEYHDLVSTSLYYANKVKDGKGVLDTDTYIVVWTTTPFTITASRGLTVGADIDYVLVQPAGEARKFVVAAELLTSLSEKFGWADVQVLETYRGQELNHIVTEHPWDTAVEELVILGDHVTTDSGTGIVHTAPGFGEDDYNVGIANNLEVAVTVDERGIMMKNAGPEFEGQFYEKVVPTVIEKLGNLLLAQEEISHSYPFDWRTKKPIIWRAVPQWFASVSKFRQEILDEIEKVKFHSEWGKVRLYNMIRDRGDWVISRQRAWGVPLPIFYAEDGTAIMVAETIEHVAQLFEEHGSSIWWERDAKDLLPEGFTHPGSPNGEFKKETDIMDVWFDSGSSWNGVVVNRPELTYPADLYLEGSDQYRGWFNSSLITSVANHGVAPYKQILSQGFALDGKGEKMSKSLGNTIAPSDVEKQFGAEILRLWVTSVDSSNDVRISMDILSQVSETYRKIRNTLRFLIANTSDFNPAQDTVAYDELRSVDKYMTIRFNQLVKTIRDAYADFEFLTIYKALVNFINVDLSAFYLDFAKDVVYIEGAKSLERRQMQTVFYDILVKITKLLTPILPHTAEEIWSYLEFETEDFVQLSELPEVQTFANQEEILDTWAAFMDFRGQAQKALEEARNAKVIGKSLEAHLTVYPNEVVKTLLEAVNSNVAQLLIVSELTIAEGPAPEAALSFEDVAFTVERATGEVCDRCRRIDPTTAERSYQAVICDHCASIVEENFAEAVAEGFEEK

SEQ ID NO: 13482 - protein, 236 aa, Streptococcus pneumoniae
MGLMAYIEMKHCYKRYQVGDTEIVANRDVNFEIEKGELVIILGASGAGKSTVLNLLGGMDTNDEGEIWIDGVNIADYSSHQRTNYRRNDVGFVFQFYNLVSNLTAKENVELASEIVTDALNSDQVLTDVGLAHRLNNFPAQLSGGEQQRVSIARAVAKNPKILLCDEPTGALDYQTGKQVLKILQDMSRQKGATVIIVTHNGALAPIADRVIQMHDASVKDVVLNQHPQDIDSLEY

SEQ ID NO: 13483 - protein, 740 aa, Streptococcus pneumoniae
MPKEVNLTGEEVVALTKEYLTEEDVHFVHKALVYAVECHSGQYRKSGEPYIIHPIQVAGILAKLKLDAVTVACGFLHDVVEDTDATLDDLEREFGPDVRMIVDGVTKLGKVEYKSIEEQLAENHRKMLMAMSEDIRVILVKLSDRLHNMRTLKHLRKDKQERISKETMEIYAPLAHRLGISSVKWELEDLSFRYLNPTEFYKITHMMKEKRREREALVDEVVTKLEEYTTERHLKGKIYGRPKHIYSIFRKMQDKRKRFEEIYDLIAIRCILDTQSDVYAMLGYVHEFWKPMPGRFKDYIANRKANGYQSIHTTVYGPKGPIEFQIRTKEMHEVAEYGVAAHWAYKKGIKGQVNSKESAIGMNWIKEMMELQDQADDAKEFVDSVKENYLAEEIYVFTPDGAVRSLPKDSGPIDFAYEIHTKVGEKATGAKVNGRMVPLTTKLKTGDQVEIIANPNSFGPSRDWLNMVKTSKARNKIRQFFKNQDKELSVNKGREMLMAQFQENGYVANKFMDKRHMDQVLQKTSYKTEDSLFAAIGFGEIGAITVFNRLTEKERREEERAKAKAEAEELVKGGEVKVENKETLKVKHEGGVVIEGASGLLVRIAKCCNPVPGDDIVGYITKGRGVAIHRVDCMNLRAQENYEQRLLDVEWEDQYSSSNKEYMAHIDIYGLNRTGLLNDVLQVLSNTTKNISTVNAQPTKDMKFANIHVSFGIANLSTLTTVVDKIKSVPEVYSVKRTNG

SEQ ID NO: 13484 - protein, 660 aa, Streptococcus pneumoniae
MLRNYEIIKKENIMINITFPDGAVREFESGVTTFEIAQSISNSLAKKALAGKFNGKLIDTTRAITEDGSIEIVTPDHEDALPILRHSATHLFAQAARRLFPDIHLGVGPAIEDGFYYDTDHTAGQISNEDLPRIEEEMQKIVKENFPSIREEVTKDEAREIFKNDPYKLELIEEHSEDEGGLTIYRQGEYVDLCRGPHVPSTGRIQIFHLLHVAGAYWRGNSDNAMMQRIYGTAWFDKKDLKNYLQMREEAKERDHRKLGKELDLFMISQEVGQGLPFWLPNGATIRRELERYIVNKELVSGYQHVYTPPLASVELYKTSGHWDHYQEDMFPTMDMGDGEEFVLRPMNCPHHIQVFKHHVHSYRELPIRIAEIGMMHRYEKSGALTGLQRVREMSLNDGHLFVTPEQIQEEFQRALQLIIDVYEDFNLTDYRFRLSLRDPQDTHKYFDNDEMWENAQTMLRAALDEMGVDYFEAEGEAAFYGPKLDIQIKTALGKEETLSTIQLDFLLPERFDLKYIGADGEDHRPVMIHRGVISTMERFTAILIENYKGAFPTWLAPHQVTLIPVSNEKHVDYAWEVAKKLRDRGVRADVDERNEKMQFKIRASQTSKIPYQLIVGDKEMEDETVNVRRYGQKETQTVSVDNFVQAILADIANKSRVEK

SEQ ID NO: 13485 - protein, 89 aa, Streptococcus pneumoniae
MAISKEKKNEIIAQYARHEGDTGSVEVQVAVLTWEINHLNEHIKQHKKDHATYRGLMKKIGRRRNLLAYLRKNDVNRYRELINSLGLRR

SEQ ID NO: 13486 - protein, 249 aa, Streptococcus pneumoniae
MFYTYLRGLVVLLLWSINGNAHYHNTDKIPNQDENYILVAPHRTWWDPVYMAFATKPKQFIFMAKKELFTNRIFGWWIRMCGAFPIDRENPSASAIKYPINVLKKSDRSLIMFPSGSRHSNDVKGGAALIAKMAKVRIMPVTYTGPMTLKGLISRERVDMNFGNPIDISDIKKMNDEGIETVANRIQTEFQRLDEETKQWHNDKKPNPLWWFIRIPALILAIILAILTIIFSFIASFIWNPDKKREELA

SEQ ID NO: 13487 - protein, 70 aa, Streptococcus pneumoniae
MNMKITLIPERCIACGLCQTYSDLFDYHDNGIVRFYDDPDQLEKEISPSQDVLEAVKNCPTRALIGNQEA

SEQ ID NO: 13488 - protein, 328 aa, Streptococcus pneumoniae
MPVTIKDVAKAAGVSPSTVTRVIQNKSTISDETKKRVRKAMKELNYHPNLNARSLVSSYTQVIGLVLPDDSDAFYQNPFFPSVLRGISQVASENHYAIQIATGKDEKERLNAISQMVYGKRVDGLIFLYAQEEDPLVKLVAEEQFPFLILGKSLSPFIPLVDNDNVQAGFDATEYFIKKGCKRIAFIGGSKKLFVTKDRLTGYEQALKHYKLTTDNNRIYFADEFLEEKGYKFSKRLFKHDPQIDAIITTDSLLAEGVCNYIAKHQLDVPVLSFDSVNPKLNLAAYVDINSLELGRVSLETILQIINDNKNNKQICYRQLIAHKIIEK

SEQ ID NO: 13489 - protein, 260 aa, Streptococcus pneumoniae
MVYTSLSSKDGNYPYQLNIAHLYGNLMNTYGDNGNILMLKYVAEKLGAHVTVDIVSLHDDFDENHYDIAFFGGGQDFEQSIIADDLPAKKESIDNYIQNDGVVLAICGGFQLLGQYYVEASGKRIEGLGVMGHYTLNQTNNRFIGDIKIHNEDFDETYYGFENHQGRTFLSDDQKPLGQVVYGNGNNEEKVGEGVHYKNVFGSYFHGPILSRNANLAYRLVTTALKKKYGQDIQLPAYEDILSQEIAEEYSDVKSKADFS

SEQ ID NO: 13490 - protein, 447 aa, Streptococcus pneumoniae
MNLKTTLGLLAGRSSHFVLSRLGRGSTLPGKVALQFDKDILQSLAKNYEIVVVTGTNGKTLTTALTVGILKEVYGQVLTNPSGANMITGIATTFLTAKSSKTGKNIAVLEIDEASLSRICDYIQPSLFVITNIFRDQMDRFGEIYTTYNMILDAIRKVPTATVLLNGDSPLFYKPTIPNPIEYFGFDLEKGPAQLAHYNTEGILCPDCQGILKYEHNTYANLGAYICEGCGCKRPDLDYRLTKLVELTNNRSRFVIDGQEYGIQIGGLYNIYNALAAVAIARFLGADSQLIKQGFDKSRAVFGRQETFHIGDKECTLVLIKNPVGATQAIEMIKLAPYPFSLSVLLNANYADGIDTSWIWDADFEQITDMDIPEINAGGVRHSEIARRLRVTGYPAEKITETSNLEQVLKTIENQDCKHAYILATYTAMLEFRELLASRQIVRKEMN

SEQ ID NO: 13491 - protein, 524 aa, Streptococcus pneumoniae
MKFNELNLSADLLAEIEKAGFVEASPIQEQTIPLALEGKDVIGQAQTGTGKTAAFGLPTLEKIRTEEATIQALVIAPTRELAVQSQEELFRFGRSKGVKVRSVYGGSSIEKQIKALKSGAHIVVGTPGRLLDLIKRKALKLQDIETLILDEADEMLNMGFLEDIEAIISRVPENRQTLLFSATMPDAIKRIGVQFMKAPEHVKIAAKELTTELVDQYYIRVKEQEKFDTMTRLMDVAQPELAIVFGRTKRRVDELTRGLKIRGFRAEGIHGDLDQNKRLRVLRDFKNGNLDVLVATDVAARGLDISGVTHVYNYDIPQDPESYVHRIGRTGRAGKSGQSITFVAPNEMGYLQIIENLTKKRMKGLKPASVEESFQSKKQVALKKIERDFADETIRANFEKFGKDARKLAAEFTPEELAMYILSLTVQDPDSLPEVEIAREKPLPFKPSGNGFGGKAKGGRGGRRGDDRRERDRRGNGRRDEFKKGSRGNDRFDKEKRYRKDNKKPRNTLSEKQTGFVIRNKGDK

SEQ ID NO: 13492 - protein, 587 aa, Streptococcus pneumoniae
MKRSMYAGRVREEHIGQEITLKGWVGRRRDLGGLIFIDLRDREGIMQLVINPEKVSAEVMATAESLRSEFVIEVTGQVAAREQANDKLPTGAVELNVTALIVLNTAKTTPFEIKDGIEANDDTRLRYRYLDLRRPEMLENLKLRAKVTHSIRNYLDELEFIDVETPFLSKSTPEGARDYLVPSRVNKGHFYALPQSPQITKQLLMNAGFDRYYQIVKCFRDEDLRGDRQPEFTQVDLETSFLTEQEIQDITEGLIARVMKETKDIEVTLPFPRMKYDDAMALYGSDKPDTRFDMLLQDLTEVVKGVDFKVFSEALAVKAIVVKGAADNYSRKDIDKMTEVAKQYGAKGLAWVKVVDGELNGPVAKFLTGIQEELTTALALEDKDLVLFVADTLEVANATLGALRGRIAKELGLIDNDKFNFLWVVDWPMFEWSEEEGRYMSAHHPFTLPQEETAHELEGDLAKVRAIAYDIVLNGYELGGGSLRINQKDLQERMFKALGFSAEEANDQFGFLLEAMDYGFPPHGGLAIGLDRFVMLLAGEENIREVIAFPKNNKATDPMTQAPSTVALKQLEELSLQVEEDETSKTN

SEQ ID NO: 13493 - protein, 252 aa, Streptococcus pneumoniae
MSRKPFIAGNWKMNKNPEEAKAFVEAVASKLPSSDLVEAGIAAPALDLTTVLAVAKGSNLKVAAQNCYFENAGAFTGETSPQVLKEIGTDYVVIGHSERRDYFHETDEDINKKAKAIFANGMLPIICCGESLETYEAGKAAEFVGAQVSAALAGLTAEQVAASVIAYEPIWAIGTGKSASQDDAQKMCKVVRDVVAADFGQEVADKVRVQYGGSVKPENVASYMACPDVDGALVGGASLEAESFLALLDFVK

SEQ ID NO: 13494 - protein, 178 aa, Streptococcus pneumoniae
MNEVKKMVELKKEAVKDVTSLTKAAPVALAKTKEVLNQAVADLYVAHVALHQVHWYMHGRGFLVWHPKMDEYMEALDGQLDEISERLITLGGSPFSTLTEFLQNSEIEEEAGEYRNVEESLERVLVIYRYLSELFQKGLDVTDEEGDDVTNGIFVGAKTETDKTIWMLAAELGQAPGL

SEQ ID NO: 13495 - protein, 168 aa, Streptococcus pneumoniae
MTKKIVAIWAQDEEGLIGKENRLPWHLPAELQHFKETTLNHAILMGRVTFDGMGRRLLPKRETLILTRNPEEKIDGVATFQDVQSVLDWYQDQEKNLYIIGGKQIFQAFEPYLDEVIVTHIHARVEGDTYFPEELDLSLFETVSSKFYAKDEKNPYDFTIQYRKRKEV

SEQ ID NO: 13496 - protein, 303 aa, Streptococcus pneumoniae
MSFTVAVKEEILGQHHLSWHELSAIIKMSGSIGLSTSGLTLSVVTENAKLARHLYESFLHFYEIKSEIRHHQRSNLRKNRVYTVFTDEKVQDLLSDLHLADSFFGLETGIDEAILSDEEAGRAYLCGAFLANGSIRDPESGKYQLEISSVYLDHAQGIASLLQQFLLDAKVLERKKGAVTYLQRAEDIMDFLIVIGAMQARDDFERVKILRETRNDLNRANNAETANIARTVSASMKTINNISKIKDIMGLENLPVDLQEVAQLRIQHPDYSIQQLADSLSTPLTKSGVNHRLRKINKIADEL

SEQ ID NO: 13497 - protein, 450 aa, Streptococcus pneumoniae
MGKYFGTDGVRGEANLELTPELAFKLGRFGGYVLSQHETEAPKVFVGRDTRISGEMLESALVAGLLSVGIHVYKLGVLATPAVAYLVETEGASAGVMISASHNPALDNGIKFFGGDGFKLDDEKEAEIEALLDAEEDTLPRPSAEGLGILVDYPEGLRKYEGYLVSTGTPLDGMKVALDTANGAASTSARQIFADLGAQLTVIGETPDGLNINLNVGSTHPEALQEVVKESGSAIGLAFDGDSDRLIAVDENGDIVDGDKIMYIIGKYLSKKGQLAQNTIVTTVMSNLGFHKALNREGINKAVTAVGDRYVVEEMRKSGYNLGGEQSGHVILMDYNTTGDGQLSAVQLTKIMKETGKSLSELAAEVTIYPQKLVNIRVENVMKEKAMEVPAIKAIIEKMEEEMAGNGRILVRPSGTEPLLRVMAEAPTTEEVDYYVDTITDVVRAEIGID

SEQ ID NO: 13498 - protein, 255 aa, Streptococcus pneumoniae
MSIRVIIAGFKGKMGQAACQMVLTDPDLDLVAVLDPFESESEWQGIPVFKDKADLAGFEADVWVDFTTPAVAYENTRFALENGFAPVVGTTGFTSEEIAELKEFSRAQDLGGLIAPNFALGAVLLMQFATQAAKYFPNVEIIELHHDKKKDAPSGTAIKTAELMAEVRESIQQGAADEEELIAGARGADFDGMRIHSVRLPGLVAHQEVIFGNQGEGLTLRHDSYDRISFMTGVNLGIKEVVKRHELVYGLEHLL

SEQ ID NO: 13499 - protein, 623 aa, Streptococcus pneumoniae
MSDFIVEKLSKSVGDKTVFRDISFIIHDLDRIGLIGVNGTGKTTLLDVLSGVSGFDGDVSPFSAKNDYQIGYLTQDPDFDDRKTVLDTVLSSELKEIQLIREYELIMLDYSEDKQARLERVMAEMDSLQAWEIESQVKTVLSKLGIQDLSTPIGELSGGLRRRVQLAQVLLGNHDLLLLDEPTNHLDIAIIEWLTLFLKNSKKTVLFITHDRYFLDALSTRIFELDRAGLTEYQGNYQDYVRLKAEQDERDAALLHKKEQLYKQELAWMRRQPQARATKQQARINRFHDLKKKVSGSSAETDLTMNFETSRIGKKVIEFQAVSFAYENKPILQDFNLLVQAKDRIGIVGDNGVGKSTLLNLIAGSLEPTKGQVVIGETVRIAYFSQQIEGLDESKRVINYLQEVAEEVKTSGGSTTSIAELLEQFLFPRSTHGTLIEKLSGGEKKRLYLLKLLLEKPNVLLLDEPTNDLDIATLTVLENFLQGFAGPVLTVSHDRYFLDKVATKILAFEDGKIRPFFGHYTDYLDEKAFETDMANQVQKVEKEKVVKVREDKKRMTYQEKQEWASIEGDIETLEKRIAAIEEEMQANGSDFGKLATLQKELDEKNEALLEKYERYEYLSEFDS

SEQ ID NO: 13500 - protein, 394 aa, Streptococcus pneumoniae
MKQSISNLKLAERGAIISISTYLILSAAKLAAGHLLHSSSLVADGFNNVSDIIGNVALLIGIRMARQPADRDHRFGHWKIEDLASLITSIIMFYVGFDVLRDTIQKILSREESVIDPLGATLGIISAAIMFVVYLYNTRLSKKSNSKALKAAAKDNLSDAVTSLGTAIAILASSFNYPIVDKLVAIIITFFILKTAYDIFIESSFSLSDGFDDRLLEDYQKAIMEIPKISKVKSQRGRTYGSNIYLDITLEMNPDLSVFESHEIADQVESMLENRFGVFDTDVHIEPAPIPEDEILDNVYKKLLMREQLIDQGNQLEELLTDDFVYIRQDGEQMDKEAYKTKKELNSAIKDIQITSISQKTKLICYELDGIIHTSIWRRHETWQNIFHQETKKE

SEQ ID NO: 13501 - protein, 96 aa, Streptococcus pneumoniae
MAKYEILYIIRPNIEEEAKNALVARFDSILTDNGATVVESKTWEKRRLAYEIQDFREGLYHIVNVEANDDAALKEFDRLSKINADILRHMIVKIDA

SEQ ID NO: 13502 - protein, 156 aa, Streptococcus pneumoniae
MINNVVLVGRMTRDAELRYTPSNVAVATFTLAVNRTFKSQNGEREADFINVVMWRQQAENLANWAKKGSLIGVTGRIQTRSYDNQQGQRVYVTEVVAENFQMLESRSVREGHTGGAYSAPTANYSAPTNSVPDFSRNENPFGATNPLDISDDDLPF

SEQ ID NO: 13503 - protein, 79 aa, Streptococcus pneumoniae
MAQQRRGGFKRRKKVDYIAANKIEYVDYKDTELLSRFVSERGKILPRRVTGTSAKNQRKVTTAIKRARVMALMPFVNED

SEQ ID NO: 13504 - protein, 311 aa, Streptococcus pneumoniae
MSKILVFGHQNPDSDAIGSSVAFAYLAKEAYGLDTEAVALGTPNEETAFVLNYFGVEAPRVITSAKAEGAEQVILTDHNEFQQSVSDIAEVEVYGVVDHHRVANFETASPLYMRLEPVGSASSIVYRMFKEHGVAVPKEIAGLMLSGLISDTLLLKSPTTHPTDKIIAPELAELAGVNLEEYGLAMLKAGTNLASKSAEELIDIDAKTFELNGNNVRVAQVNTVDIAEVLERQAEIEAAMQAANESNGYSDFVLMITDIVNSNSEILALGANMDKVEAAFNFKLEYNHAFLAGAVSRKKQVVPQLTESFNA

SEQ ID NO: 13505 - protein, 481 aa, Streptococcus pneumoniae
MIKIETVLDILKKDGLFREIIDQGHYHYNYSKVIFDSISYDSRKVTEDTLFFAKGAAFKKEYLLSAITQGLAWYVAEKDYEVDIPVIIVNDIKKAMSLIAMEFYGNPQEKLKLLAFTGTKGKTTATYFAYNILSQGHRPAMLSTMNTTLDGETFFKSALTTPESIDLFDMMNQAVQNDRTHLIMEVSSQAYLVHRVYGLTFDVGVFLNITPDHIGPIEHPSFEDYFYHKRLLMENSRAVIINSDMDHFSVLKEQVEDQDHDFYGSQFDNQIENSKAFSFSATGKLAGDYDIQLIGNFNQENAVAAGLACLRLGASLEDIKKGIAATRVPGRMEVLTQKNGAKVFIDYAHNGDSLKKLINVVETHQTGKIALVLGSTGNKGESRRKDFGLLLNQHPEIQVFLTADDPNYEDPMAIADEISSYINHPVEKIADRQEAIKAAMAITNHELDAVIIAGKGADCYQIIQGKKESYPGDTAVAENYL

SEQ ID NO: 13506 - protein, 429 aa, Streptococcus pneumoniae
MKLQKPKGTQDILPAESAKWQYVEGFAREIFKRYNYAEVRTPIFEHYEVISRSVGDTTDIVTKEMYDFYDKGDRHITLRPEGTAPVVRSYVENKLFAPEVQKPSKFYYMGPMFRYERPQAGRLRQFHQIGVECFGSSNPATDVETIAMAAHFLKEIGIQGVKLHLNTLGNPESRAAYRQALIDYLTPLKETLSKDSQRRLEENPLRVLDSKEKEDKVAVENAPSILDFLDEESQTHFDAVRQMLENLGVDYIIDTNMVRGLDYYNHTIFEFITEIEGNDLTVCAGGRYDGLVAYFGGPETAGFGFGLGVERLLLILEKQGVALPIENALDVYIAVLGDGANVKALELVQALRQQGFKAERDYLNRKLKAQFKSADVFAAKTLITLGESEVESGQVTVKNNQTREEVQVSLETISQNFSEIFEKLGFYTQ

SEQ ID NO: 13507 - protein, 444 aa, Streptococcus pneumoniae
MSKTYHFIGIKGSGMSALALMLHQMGHKVQGSDVEKYYFTQRGLEQAGITILPFDEKNLDGDMEIIAGNAFRPDNNVEIAYADQNGISYKRYHEFLGSFMRDFVSMGVAGAHGKTSTTGMLSHVLSHITDTSFLIGDGTGRGSANAKYFVFESDEYERHFMPYHPEYSIITNIDFDHPDYFTSLEDVFNAFNDYAKQITKGLFVYGEDAELRKITSDAPIYYYGFEAEGNDFVASDLLRSTTGSTFTVHFRGQNLGQFHIPTFGRHNIMNATAVIGLLYTAGFDLNLVREHLKTFAGVKRRFTEKIVNDTVIIDDFAHHPTEIIATLDAARQKYPSKEIVAVFQPHTFTRTIALLDDFAHALNQADAVYLAQIYGSAREVDHGDVKVEDLANKINKKHQVITVENVSPLLDHDNAVYVFMGAGDIQTYEYSFERLLSNLTSNVQ

SEQ ID NO: 13508 - protein, 238 aa, Streptococcus pneumoniae
MEESINPIISIGPVIFNLTMLAMTLLIVGVIFVFIYWASRNMTLKPKGKQNVLEYVYDFVIGFTEPNIGSRYMKDYSLFFLCLFLFMVIANNLGLMTKLQTIDGTNWWSSPTANLQYDLTLSFLVILLTHIESVRRRGFKKSIKSFMSPVFVIPMNILEEFTNFLSLALRIFGNIFAGEVMTSLLLLLSHQAIYWYPVAFGANLAWTAFSVFISCIQAYVFTLLTSVYLGNKINIEEE

SEQ ID NO: 13509 - protein, 164 aa, Streptococcus pneumoniae
MHVTVGELIGNFILITGSFILLLVLIKKFAWSNITGIFEERAEKIASDIDRAEEARQKAEVLAQKREDELAGSRKEAKTIIENAKETAEQSKANILADAKLEAGHLKEKANQEIAQNKVEALQSVKGEVADLTISLAGKIISQNLDSHAHKALIDQYIDQLGEA

SEQ ID NO: 13510 - protein, 477 aa, Streptococcus pneumoniae
MTETGVVTYIGDGIARAHGLENVMSGELLNFENGSYGMAQNLESTDVGIIILGDFTDIREGDTIRRTGKIMEVPVGESLIGRVVDPLGRPVDGLGEIHTDKTRPVEAPAPGVMQRKSVSEPLQTGLKAIDALVPIGRGQRELIIGDRQTGKTTIAIDTILNQKDQDMICIYVAIGQKESTVRTQVETLRQYGALDYTIVVTASASQPSPLLFLAPYAGVAMAEEFMYQGKHVLIVYDDLSKQAVAYRELSLLLRRPPGREAFPGDVFYLHSRLLERSAKVSDELGGGSITALPFIETQAGDISAYIATNVISITDGQIFLGDGLFNAGIRPAIDAGSSVSRVGGSAQIKAMKKVAGTLRIDLASYRELEAFTKFGSDLDAATQAKLNRGRRTVEVLKQPVHKPLPVEKQVTILYALTHGFLDTVPVDDIVRFEEEFHAFFDAQHPEILETIRDTKDLPEEAVLDAAITEFLNQSSFQ

SEQ ID NO: 13511 - protein, 567 aa, Streptococcus pneumoniae
MTELDKRHRSSIYDSMVKSPNRAMLRATGMTDKDFETSIVGVISTWAENTPCNIHLHDFGKLAKEGVKSAGAWPVQFGTITVADGIAMGTPGMRFSLTSRDIIADSIEAAMSGHNVDAFVAIGGCDKNMPGSMIAIANMDIPAIFAYGGTIAPGNLDGKDIDLVSVFEGIGKWNHGDMTAEDVKRLECNACPGPGGCGGMYTANTMATAIEVLGMSLPGSSSHPAESADKKEDIEAAGRAVVKMLELGLKPSDILTREAFEDAITVTMALGGSTNATLHLLAIAHAANVDLSLEDFNTIQERVPHLADLKPSGQYVFQDLYEVGGVPAVMKYLLANGFLHGDRITCTGKTVAENLADFADLTPGQKVIMPLENPKRADGPLIILNGNLAPDGAVAKVSGVKVRRHVGPAKVFDSEEDAIQAVLTDEIVDGDVVVVRFVGPKGGPGMPEMLSLSSMIVGKGQGDKVALLTDGRFSGGTYGLVVGHIAPEAQDGGPIAYLRTGDIVTVDQDTKEISMAVSEEELEKRKAETTLPPLYSRGVLGKYAHIVSSASRGAVTDFWNMDKSGKK

SEQ ID NO: 13512 - protein, 448 aa, Streptococcus pneumoniae
MMKFILDIVSTPAILVALIAILGLVLQKKKLPDIIKGGIKTFVGFLVVSGGAGIVQNSLNPFGTMFEHAFHLSGVVPNNEAIVAVALTTYGSATAMIMFAGMVFNILIARFTRFKYIFLTGHHTLYMACMIAVILSVAGFTSLPLILLGGLALGIIMSISPAFVQKYMVQLTGNDKVALGHFSSLGYWLSGFTGSLIGDKSKSTEDIKFPKSLAFLRDSTVSITLSMAVIYIIVAIFAGSEYIEKEISSGTSGLVYALQLAGQFAAGVFVILAGVRLILGEIVPAFKGISERLVPNSKPALDCPIVYTYAPNAVLIGFISSFIGGLVSMAIMIASGTVVILPGVVPHFFCGATAGVIGNASGGVRGATIGAFLQGILISFLPVFLMPVLGGLGFQGSTFSDADFGLSGIILGMLNQFGSQAGIVIGLVLILAVMFGVSFIKKPSAKEE

SEQ ID NO: 13513 - protein, 676 aa, Streptococcus pneumoniae
MFDYRALVILMTLMDHCELSLYELSVKVSLPIKEVKEGIDYLVPYLANKGIVLDKKQGRYSLSNRTKQSLTDIIKSDELVLPKSTRLALIYLYTFCRLDFISNNHYQDFLKVSKNTTLSDIQSLRKIMLDNDLELGYSRAKGYTLHGSEWNKHRLAFQMVSELLESSIGIWDLDYVLSSWGYSLTYDLINQVVKDYYEKLQLVPIVNQLKVCLFGLVFILCRYQRDVERVCLSETLVSPVIQDITTILLDTVVDLGIIDTVFSEDDYRYITVLLSSCFEGEVDVAPVYFNQLTEAIISRMEDISLLHFKQREGLRENLRRHLIPAYYRLKFGLPSSNEYVLHVKEHYPDLFELVKDSLMPLMDAIDNPIPDSETAYFVIHFGGYLKKADTLPQKCYKAAIICPNGVSSSLMLKENLLALFPQIEFIATSKIDDLQVKASSDYDMVFSTIKVETEKPNYLVSVMMTEEQAIQLVELVLKDFPNLEYGDFEIEQILNIVKRYGIITQELELRLALKNYLYQKNDRKEIVPVLEQLITKETYQVSSQKLGWKEAIRLAAKPLLDQDKITENYPEAMIQKVEEFGPFINLGKGVAIPHARPDEGVNEIGMSMLVLEEPIYLLDNPEQEVRLLICIAAIDNESHLKALSHLTTILRDKNHVQTLISSKNYDDIKMIIKQED

SEQ ID NO: 13514 - protein, 315 aa, Streptococcus pneumoniae
MANRKIVVALGGNAILSSDPSAKAQQEALVETAKHLVKLIKNGDDLIITHGNGPQVGNLLLQHLASDSEKNPAFPLDSLVAMTEGSIGFWLKNALQNALLDEGIEKNVASVVTQVVVDKNDPAFVNLSKPIGPFYSEEEAKAEAEKSGATFKEDAGRGWRKVVASPKPVDIKEIETIRTLLNNGQVVVAAGGGGIPVVKENNGHLTGVEAVIDKDFASQRLAELVDADLFIVLTGVDYVFVNYNKPNQEKLEHVNVAQLEEYIKQDQFAPGSMLPKVEAAIAFVNGRPEGKAVITSLENLGALIESESGTIIEKG

SEQ ID NO: 13515 - protein, 844 aa, Streptococcus pneumoniae
MAIEKLSPGMQQYVDIKKQYPDAFLLFRMGDFYELFYEDAVNAAQILEISLTSRNKNADNPIPMAGVPYHSAQQYIDVLIEQGYKVAIAEQMEDPKQAVGVVKREVVQVITPGTVVDSSKPDSQNNFLVSIDREGNQFGLAYMDLVTGDFYVTGLLDFTLVCGEIRNLKAREVVLGYDLSEEEDQILSRQMNLVLSYEKESFEDLHLLDLRLATVEQTASSKLLQYVHLTQMRELNHLKPVIRYDIMDFLHMDYATMASLDLVENARSGKKQGSLFWLLDETKTAMGMRLLRSWIHRPLIDKERIVQRQEVVQVFLDHFFERSDLTDSLKGVYDIERLASRVSFGKTNPKDLLQLATTLSSVPRIRAILEGMEQPTLAYLIAQLDAIPELESLISAAIAPEAPHVITDGGIIRTGFDETLDKYRCVLREGTSWIAEIEAKERENSGISTLKIDYNKKDGYYFHVTNSQLGNVPAHFFRKATLKNSERFGTEELARIEGDMLEAREKSANLEYEIFMRIREEVGKYIQRLQALAQGIATVDVLQSLAVVAETQHLIRPEFGDDSQIDIRKGRHAVVEKVMGAQTYIPNTIQMAEDTSIQLVTGPNMSGKSTYMRQLAMTAVMAQLGSYVPAESAHLPIFDAIFTRIGAADDLVSGQSTFMVEMMEANNAISHATKNSLILFDELGRGTATYDGMALAQSIIEYIHEHIGAKTLFATHYHELTSLESSLQHLVNVHVATLEQDGQVTFLHKIEPGPADKSYGIHVAKIAGLPADLLARADKILTQLENQGTESPPPMRQTSAVTEQISLFDRAEEHPILAELAKLDVYNMTPMQVMNVLVELKQKL

SEQ ID NO: 13516 - protein, 212 aa, Streptococcus pneumoniae
MMGKIEVINHPLIQHKLSILRRTDTSTKAFRELVDEIAMLMGYEVLRDLPLEDVEIETPITKTVQKQLAGKKLAIVPILRAGIGMVDGLLSLVPAAKVGHIGMYRDEETLQPVEYLVKLPEDIDQRQIFVVDPMLATGGSAILAVDSLKKRGASNIKFVCLVSAPEGVKALQEAHPDVEIFTAALDERLNEHGYIVPGLGDAGDRLFGTKNN

SEQ ID NO: 13517 - protein, 141 aa, Streptococcus pneumoniae
MAKKVEKLVKLQIPAGKATPAPPVGPALGQAGINIMGFTKEFNARTADQAGMIIPVVISVYEDKSFTFVTKTPPAAVLLKKAAGVEKGSGTPNKTKVATVTRAQVQEIAETKMPDLNAANVESAMRMIEGTARSMGITVVN

SEQ ID NO: 13518 - protein, 246 aa, Streptococcus pneumoniae
MLSSGEDRVIASPVAGTTRDAIDTHFTDTDGQEFTMIDTAGMRKSGKVYENTEKYSVMRAMRAIDRSDVVLMVINAEEGIREYDKRIAGFAHEAGKGMIIVVNKWDTLEKDNHTMKNWEEDIREQFQYLPYAPIIFVSALTKQRLHKLPEMIKQISESQNTRIPSAVLNDVIMDAIAINPTPTDKGKRLKIFYATQVATKPPTFVIFVNEEELMHFSYLRFLENQIRKAFVFEGTPIHLIARKRKN

SEQ ID NO: 13519 - protein, 333 aa, Streptococcus pneumoniae
MALTEQKRVRLEKLSDENGIISALAFDQRGALKRLMAQHQTEEPTVAQMEELKVLVADELTKYASSMLLDPEYGLPATKALDEKAGLLLAYEKTGYDTTSTKRLPDCLDVWSAKRIKEEGADAVKFLLYYDVDSSDELNQEKQAYIERIGSECVAEDIPFFLEILAYDEKIADAGSVEYAKVKPHKVIGAMKVFSDPRFNIDVLKVEVPVNIKYVEGFAEGEVVYTREEAAAFFKAQDEATNLPYIYLSAGVSAKLFQDTLVFAHESGANFNGVLCGRATWAGSVEAYIKDGETAAREWFAQLDLKTLMSSTKFFKQQQLHGKNVCKKVLLVN

SEQ ID NO: 13520 - protein, 208 aa, Streptococcus pneumoniae; identical to SEQ ID NO: 13197

SEQ ID NO: 13521 - protein, 557 aa, Streptococcus pneumoniae
MAIIAHVDHGKTTLVDELLKQSETLDARTELAERAMDSNDIEKERGITILAKNTAVAYNGTRINIMDTPGHADFGGEVERIMKMVDGVVLVVDAYEGTMPQTRFVLKKALEQDLVPIVVVNKIDKPSARPAEVVDEVLELFIELGADDDQLDFPVVYASAINGTSSLSDDPADQEATMAPIFDTIIDHIPAPVDNSDEPLQFQVSLLDYNDFVGRIGIGRVFRGTVKVGDQVTLSKLDGTTKNFRVTKLFGFFGLERREIQEAKAGDLIAVSGMEDIFVGETITPTDAVEALPILHIDEPTLQMTFLVNNSPFAGKEGKWVTSRKVEERLQAELQTDVSLRVDPTDSPNKWTVSGRGELHLSILIETMRREGYELQVSRPEVIVKEIDGVKCEPFERVQIDTPEEYQGSVIQSLSERKGEMLDMISTGNGQTRLVFLVPARGLIGYSTEFLSMTRGYGIMNHTFDQYLPLIPGEIGGRHRGALVSIDAGKATTYSIMSIEERGTIFVNPGTEVYEGMIIGENSRENDLTVNITKAKQMTNVRSATKDQQLLSRRLVN

SEQ ID NO: 13522 - protein, 174 aa, Streptococcus pneumoniae
MNLLPEKVTLLKTKFFQKPKKKRAPKLGDDIVVLSYGQRGTLTSQLKDGRWEAQVGLIKMTLEEKEFDLVQAQQEKPVKKKQVNVVKRTSGRGPQARLDLRGKRYEEAMNELDTFIDQALLNNMAQVDIIHGIGTGVIREGVTKYLQRNKHVKSFGYAPQNAGGSGATIVTFKG

SEQ ID NO: 13523 - protein, 45 aa, Streptococcus pneumoniae
MKRTYQPSKLRRARKHGFRNRMSTKNGRRVLAARRRKGRKVLAAN

SEQ ID NO: 13524 - protein, 317 aa, Streptococcus pneumoniae
MSVREKMLEILEGIDIRFKEPLHSYSYTKVGGEADYLVFPRNRFELARVVKFANQENIPWMVLGNASNIIVRDGGIRGFVILCDKLNNVSVDGYTIEAEAGANLIETTRIALRHSLTGFEFACGIPGSVGGAVFMNAGAYGGEIAHILQSCKVLTKDGEIETLSAKDLAFGYRHSAIQESGAVVLSVKFALAPGTHQVIKQEMDRLTHLRELKQPLEYPSCGSVFKRPVGHFAGQLISEAGLKGYRIGGVEVSEKHAGFMINVADGTAKDYEDLIQSVIEKVKEHSGITLEREVRILGESLSVAKMYAGGFTPCKRN

SEQ ID NO: 13525 - protein, 466 aa, Streptococcus pneumoniae
MAFESLTERLQNVFKNLRKKGKISESDVQEATKEIRLALLEADVALPVVKDFIKKVRERAVGHEVIDTLNPAQQIIKIVDEELTAVLGSDTAEIIKSPKIPTIIMMVGLQGAGKTTFAGKLANKLKKEENARPLMIAADIYRPAAIDQLKTLGQQIDVPVFALGTEVPAVEIVRQGLEQAQTNHNDYVLIDTAGRLQIDELLMNELRDVKALAQPNEILLVVDAMIGQEAANVAREFNAQLEVTGVILTKIDGDTRGGAALSVRHITGKPIKFTGTGEKITDIETFHPDRMSSRILGMGDMLTLIEKASQEYDEQKALEMAEKMRENTFDFNDFIDQLDQVQNMGPMEDLLKMIPGMANNPALQNMKVDERQIARKRAIVSSMTPEERENPDLLNPSRRRRIAAGSGNTFVEVNKFIKDFNQAKQLMQGVMSGDMNKMMKQMGINPNNLPKNMPNMGGMDMSALEN

SEQ ID NO: 13526 - protein, 262 aa, Streptococcus pneumoniae
MDNRPIGFLDSGVGGLTVVRELMRQLPHEEIVYIGDSARAPYGPRPAEQIREYTWQLVNFLLTKDVKMIVIACNTATAVVWEEIKAQLDIPVLGVILPGASAAIKSSQGGKIGVIGTPMTVQSDIYRQKIHDLDPDLQVESLACPKFAPLVESGALSTSVTKKVVYETLRPLVGKVDSLILGCTHYPLLRPIIQNVMGPKVQLIDSGAECVRDISVLLNYFEINRGRDAGPLHHRFYTTASSQSFAQIGEGWLEKEIMWSMN

SEQ ID NO: 13527 - protein, 121 aa, Streptococcus pneumoniae; identical to SEQ ID NO: 13470

SEQ ID NO: 13528 - protein, 137 aa, Streptococcus pneumoniae; identical to SEQ ID NO: 13204

SEQ ID NO: 13529 - protein, 86 aa, Streptococcus pneumoniae; identical to SEQ ID NO: 13207

SEQ ID NO: 13530 - protein, 122 aa, Streptococcus pneumoniae; identical to SEQ ID NO: 13208

SEQ ID NO: 13531 - protein, 146 aa, Streptococcus pneumoniae
MGVYNMSIVIGADAAGLRLKEVVKDFLEKENFHLVDVTAEGQDFVDVTLAVAAEVNKEEQNLGIVIDAYGAGSFMVATKIKGMVAAEVSDERSAYMTRGHNNSRMITMGAQLVGDELAKNIAKGFVNGKYDGGRHQIRVDMLNKMG

SEQ ID NO: 13532 - protein, 171 aa, Streptococcus pneumoniae; identical to SEQ ID NO: 13274

SEQ ID NO: 13533 - protein, 230 aa, Streptococcus pneumoniae
MNNNFNNFNNMDDLFNQLMGGMRGYSSENRRYLINGREVTPEEFAHYRATGQLPGNAETDVQMPQQASGMKQDGVLAKLGRNLTAEAREGKLDPVIGRNKEIQETSEILSRRTKNNPVLVGDAGVGKTAVVEGLAQAIVNGDVPAAIKNKEIISIDISGLEAGTQYRGSFEENVQNLVNEVKEAGNIILFFDEIHQILGAGSTGGDSGSKGLADILKPALSRGELTVIGN

SEQ ID NO: 13534 - protein, 101 aa, Streptococcus pneumoniae
MMNMQNMMRQAQKLQKQMEQSQAELAAMQFVGKSAQDLVQATLTGDKKVVSIDFNPAVVDPEDLETLSDMTVQAINSALEQIDETTKKKLGAFAGKLPFNN

SEQ ID NO: 13535 - protein, 181 aa, Streptococcus pneumoniae; identical to SEQ ID NO: 13442

SEQ ID NO: 13536 - protein, 213 aa, Streptococcus pneumoniae; identical to SEQ ID NO: 13329

SEQ ID NO: 13537 - protein, 466 aa, Streptococcus pneumoniae
MTAIDFTAEVEKRKEDLLADLFSLLEINSERDDSKADAQHPFGPGPVKALEKFLEIADRDGYPTKNVDNYAGHFEFGDGEEVLGIFAHMDVVPAGSGWDTDPYTPTIKDGRLYARGASDDKGPTTACYYGLKIIKELGLPTSKKVRFIVGTDEESGWADMDYYFEHVGLAKPDFGFSPDAEFPIINGEKGNITEYLHFAGENTGVARLHSFTGGLRENMVPESATAVVSGDLADLQAKLDAFVAEHKLRGELQEEAGKYKVTIIGKSAHGAMPASGVNGATYLALFLSQFGFAGPAKDYLDIAGKILLNDHEGENLKIAHVDEKMGALSMNAGVFRFDETSADNTIALNIRYPKGTSPEQIKSILENLPVVSVSLSEHGHTPHYVPMEDPLVQTLLNIYEKQTGFKGHEQVIGGGTFGRLLERGVAYGAMFPDSIDTMHQANEFIALDDLFRAAAIYAEAIYELIK

SEQ ID NO: 13538 - protein, 151 aa, Streptococcus pneumoniae
MHGYKQMNPMVFAGLYPIESNKYNDLREALEKLQLNDASLQFEPETSQALGFGFRCGFLGLLHMDVIQERLEREFNIDLIMTAPSVIYKVNLTDGESMDVSNPSEFPDPTKIATIEEPYVKAQIMVPQEFVGAVMELAQRKVEGLCDYGLY

SEQ ID NO: 13539 - protein, 277 aa, Streptococcus pneumoniae; identical to SEQ ID NO: 13200

SEQ ID NO: 13540 - protein, 93 aa, Streptococcus pneumoniae; identical to SEQ ID NO: 13201

SEQ ID NO: 13541 - protein, 329 aa, Streptococcus pneumoniae
MQIYMKGRGMKLSHYLIGLLLLLVFLSISIGTSDFSWGKLFDFDQQTWLLFQESRLPRTISILLTASSMSMAGLLMQTITQNQFAAPSTVGTTEAAKLGMVLSLFVFPSASLTQKMLFAFVSSIVFTLFFLAFMTIFTVKERWMLPLIGIIYSGIIGSVTEVIAYRFNLVQSMTAWTQGSFSMIQTHQYEWLFLGLIILITVWKLSQTFTIMNLGKETSESLGISYSLLEKLALFLVALTTSVTMITVGGLPFLGVIVPNLVRKRYGDNLSQTKLMVALVGANLVLACDILSRVLIRPYELSVSLLLGIIGSLVFILLLWRGGRKDADN

SEQ ID NO: 13542 - protein, 472 aa, Streptococcus pneumoniae
MIIKGNFYRKEKIMSNFAIILAAGKGTRMKSDLPKVLHKVAGISMLEHVFRSVGAIQPEKTVTVVGHKAELVEEVLAEQTEFVTQSEQLGTGHAVMMTEPILEGLSGHTLVIAGDTPLITGESLKNLIDFHINHKNVATILTAETDNPFGYGRIVRNDNAEVLRIVEQKDATDFEKQIKEINTGTYVFDNERLFEALKNINTNNAQGEYYITDVIGIFRETGEKVGAYTLKDFDESLGVNDRVALATAESVMRRRINHKHMVNGVSFVNPEATYIDIDVEIAPEVQIEANVILKGQTKIGAETVLTNGTYVVDSTIGAGAVITNSMIEESSVADGVTVGPYAHIRPNSSLGAQVHIGNFVEVKGSSIGENTKAGHLTYIGNCEVGSNVNFGAGTITVNYDGKNKYKTVIGDNVFVGSNSTIIAPVELGDNSLVGAGSTITKDVPADAIAIGRGRQINKDEYATRLPHHPKNQ

SEQ ID NO: 13543 - protein, 167 aa, Streptococcus pneumoniae
MINNVVLVGRLTRDAELRYTQSNIAVATFTLAVNRPFKNEAGEREADFINCVIWRQLAENLANWAKKGSLIGVTGVIQTRSYDNQQGQRVYVTEVVASNFQLLESRNSQQNNQGHQDHHGGYQQQGYSNQGSSFQNGNSYGQQGSFVEGNTTNLVPDFTRDNNPFVN

SEQ ID NO: 13544 - protein, 363 aa, Streptococcus pneumoniae
MKRLFMGYTVAVVGATGAVGAQMIKMLEESTLPIDKIRYLASARSAGKSLKFKDQDITIEETTETAFEGVDIALFSAGGSTSAKYAPYAVKAGVVVVDNTSYFRQNPDVPLVVPEVNAHALDAHNGIIACPNCSTIQMMVALEPVRQKWGLDRIIVSTYQAVSGAGMGAILETQRELREVLNDGVKPRDLHAEILPSGGDKKHYPIAFNALPQIDVFTDNDYTYEEMKMTKETKKIMEDDSIAVSATCVRIPVLSAHSESVYIETKEVAPIEEVKAAIASFPGAVLEDDVVHQIYPQAINAVGSRDTFVGRIRKDLDAEKGIHMWVVSDNLLKGAAWNSVQIAETLHERGLVRPTAELKFELK

SEQ ID NO: 13545 - protein, 339 aa, Streptococcus pneumoniae
MEKKKLRINMLSSSEKVAGQGVSGAYRELVRLLHRAAKDQLIVTENLPIEADVTHFHTIDFPYYLSTFQKKRSGRKIGYVHFLPATLEGSLKIPFFLKGIVKRYVFSFYNRMEHLVVVNPMFIEDLVAAGIPREKVTYIPNFVNKEKWHPLPQEEVVRLRTDLGLSDNQFIVVGAGQVQKRKGIDDFIRLAEELPQITFIWAGGFSFGGMTDGYEHYKKIMENPPKNLIFPGIVSPERMRELYALADLFLLPSYNELFPMTILEAASCEAPIMLRDLDLYKVILEGNYRATAGREEMKEAILEYQANPAALKRSPKKRAKEYFPESISEEHLVTNLGWN

SEQ ID NO: 13546 - protein, 96 aa, Streptococcus pneumoniae; identical to SEQ ID NO: 13501

SEQ ID NO: 13547 - protein, 156 aa, Streptococcus pneumoniae; identical to SEQ ID NO: 13502

SEQ ID NO: 13548 - protein, 80 aa, Streptococcus pneumoniae
MAQQRRGGFKRRKKVDYIAANKIEYVDYKDTELLSRFVSERGKILPRRVTGTSAKNQRKVTTAIKRARVMALMPFVNEDN

SEQ ID NO: 13549 - protein, 177 aa, Streptococcus pneumoniae
MKETYTDEHLEIMRDNCENLRDLAIIDLLASTGMRVGELVQLNRSDIDFENRECVVFGKGKKERPVYFDARTKIHLRNYLNDRKDSHPALFVTLVGKAQRLGIAGVEIRLRKLGDKLGIQKVHPHKFRRTLATKAIDKGMPIEQVQKLLGHSKIDTTLAYAMVNQNNVKHSHQKFIS

SEQ ID NO: 13550 - protein, 257 aa, Streptococcus pneumoniae
MIFDTHTHLNVEEFAGREAEEIALAAEMGVIQMNIVGFDKPTIERALELVDEYEQLYATIGWHPTEAGTYTEEVEAYLLDKLKHPKVVALGEIGLDYHWMTAPKEVQEQVFRRQIQLSKDLDLPFVVHTRDALEDTYEIIKSEGVGPRGGIMHSFSGTLEWAEKFVDLGMTISFSGVVTFKKATDLQEAAKELPLDKILVETDAPYLAPVPKRGRENKTAYTRYVVDFIADLRGMTTEELAVETTANAERIFGLDSK

SEQ ID NO: 13551 - protein, 186 aa, Streptococcus pneumoniae
MKEKISQVIVVEGRDDTVNLKRYFDVETYETRGSAINDQDIERIQRLHQRHGVIVFTDPDFNGERIRRMIMTAIPTVQHAFLKRDEAVPKSKTKGRSLGIEHASYEDLKTALAQVTEQFEHESQFDISRSDLIRLGFLAGADSRKRREYLGETLRIGYSNGKQLLKRLELFGVTLAEVEEAMKSYE

SEQ ID NO: 13552 - protein, 442 aa, Streptococcus pneumoniae
MFAQERLTRSMYDFYAIQAELIKVEENVATIFLPRSEMEMVWEKQLKDIIVVAGFEIYDAEITPHYIFTKPQDTTSSQVEEATNLTLYDYSPKLVSIPYSDTGLKEKYTFDNFIQGDGNVWAVSAALAVSEDLALTYNPLFIYGGPGLGKTHLLNAIGNEILKNIPNARVKYIPAESFINDFLDHLRLGEMEKFKKTYRSLDLLLIDDIQSLSGKKVATQEEFFNTFNALHDKQKQIVLTSDRSPKHLEGLEERLVTRFSWGLTQTITPPDFETRIAILQSKTEHLGYNFQSDTLEYLAGQFDSNVRDLEGAINDITLIARVKKIKDITIDIAAEAIRARKQDVSQMLVIPIDKIQTEVGNFYGVSIKEMKGSRRLQNIVLARQVAMYLSRELTDNSLPKIGKEFGGKDHTTVIHAHAKIKSLIDQDDNLRLEIESIKKKIK

SEQ ID NO: 13553 - protein, 305 aa, Streptococcus pneumoniae
MNQQELAKKMLLPSKNSRLEKLGKGLTFACLSLIVILVAMILVFVAQKGLSTFFVNGVNIFDFLLGGTWNPSSKEFGALPMILGSFIVTILSALIATPFAIGAAVFMTEVSPKGAKILQPAIELLVGIPSVVYGFIGLQVVVPFVRSVFGGTGFGILSGISVLFVMILPTVTFMTTDSLRAVPRYYREASFAMGATRWQTIWRVILKAARSGIFTAVVFGMARAFGEALAIQMVVGNSAVIPTSLTTPAATLTSILTMGIGNTVMGTVNNNVLWSLALVLLLMSLVFNSVIKLITKERGKKNYAR

SEQ ID NO: 13554 - protein, 149 aa, Streptococcus pneumoniae
MAINARIEPGAIIRDQVEIGDNAVIMMGAVINIGAEIGAGTMIDMGAILGGRAIVGKNSHVGAGAVLAGVIEPASAEPVRVGDNVLIGANAVVIEGVQIGSGSVVAAGAIVTQDVPENVVVAGVPARIIKEIDAQTQQKTALEDALRTL

SEQ ID NO: 13555 - protein, 264 aa, Streptococcus pneumoniae; identical to SEQ ID NO: 13439

SEQ ID NO: 13556 - protein, 328 aa, Streptococcus pneumoniae; identical to SEQ ID NO: 13488

SEQ ID NO: 13557 - protein, 614 aa, Streptococcus pneumoniae
MGLKHLEDVTYFRLNNEINRPVNGQIMLHKDKEALDAFFKENVVPNTMVFDSIKDKINYLIEHNYIETAFIKKYRPEFLEELAQFIKDQNFQFKSFMAAYKFYNQYALKTNDGEYYLENMEDRVFFNALYFADGNEAVAIDIANEIIHQRYQPATPSFLNAGRARRGELVSCFLIQVTDDMNSIGRSINSALQLSRIGGGVGITLSNLREAGAPIKGYEGAASGVVPVMKLFEDSFSYSNQLGQRQGAGVVYLNVFHPDIIAFLSTKKENADEKVRVKTLSLGVVVPDKFYELARKNEEMYLFSPYSVEKEYGVPFNYIDITEKYDELVANPNIRKTKIKARDLETEISKLQQESGYPYVVNIDTANRANPVDGKIIMSNLCSEILQVQEPSLINDAQEFLQMGTDVSCNLGSTNVVNMMTSPDFGRSIRAMVRALTFVTDSSHIVAVPTIDHGNSQAHTFGLGAMGLHSYLAQQLIEYGSPESVEFTSIYFMLMNYWTLVESNNIARERGITFHNFEKSDYANGSYFDKYVTGEFVPTSDRVKELFKNVFIPGVADWAELRDKVQEDGLYHQNRLAVAPNGSISYINDVSASIHPITQRIEERQEKKIGKIYN

SEQ ID NO: 13558 - protein, 234 aa, Streptococcus pneumoniae; identical to SEQ ID NO: 13265

SEQ ID NO: 13559 - protein, 449 aa, Streptococcus pneumoniae; identical to SEQ ID NO: 13266

SEQ ID NO: 13560 - protein, 423 aa, Streptococcus pneumoniae
MLLIKNGRVMDPKSGLDQVCDVLVQDGKIIKIAPEITEEGAETIDATGLVVAPGLVDIHVHFREPGQTHKEDIHTGALAAAAGGFTTVVMMANTSPTISDVETLQAVLQSAAKEKINVKTVATITKNFNGKNLTDFKALLEAGAVGFSDDGIPLESSKIVKEAMEEAKKLNTFISLHEEDPGLNGVLGFNENIAREHFHICGATGVAEYAMMARDVMIAYATKAHVHIQHLSKEESVKVVEFAQGLGAEVTAEVAPQHFSKTEALLLTQGSNAKMNPPLRLESDRRAVIEGLKSGVITVIATDHAPHHVDEKNVEDITKAPSGMTGLETSLSLGLTYLVEAGELSLMELLEKMTYNPAKLYNFKAGYLAENGPADITIFDAKADRLVDSHFASKAANSPFIGETLKGQVKYTICKGQIVYQAN

SEQ ID NO: 13561 - protein, 296 aa, Streptococcus pneumoniae
MTKKQLHLVIVTGMSGAGKTVAIQSFEDLGYFTIDNMPPALLPKFLQLVEIKEDNPKLALVVDMRSRSFFSEIQAVLDELENQDGLDFKILFLDAADKELVARYKETRRSHPLAADGRILDGIKLERELLAPLKNMSQNVVDTTELTPRELRKTLAEQFSDQEQAQSFRIEVMSFGFKYGIPIDADLVFDVRFLPNPYYLPELRNQTGVDEPVYDYVMNHPESEDFYQHLLALIEPILPSYQKEGKSVLTIAMGCTGGQHRSVAFAKRLVQDLSKNWSVNEGHRDKDRRKETVNRS

SEQ ID NO: 13562 - protein, 325 aa, Streptococcus pneumoniae
MRKPKITVIGGGTGIPVILKSLREKDVEIAAIVTVADDGGSSGELRKNMQQLTPPGDLRNVLVAMSDMPKFYEKVFQYRFSEDAGAFAGHPLGNLIIAGLSEMQGSTYNAMQLLSKFFHTTGKIYPSSDHPLTLHAVFQDGTEVAGESHIVDHRGIIDNVYVTNALNDDTPLASRRVVQTILESDMIVLGPGSLFTSILPNIVIKEIGRALLETKAEIAYVCNIMTQRGETEHFTDSDHVEVLHRHLGRPFIDTVLVNIEKVPQEYMNSNRFDEYLVQVEHDFVGLCKQVSRVISSNFLRLENGGAFHDGDLIVDELMRIIQVKK

SEQ ID NO: 13563 - protein, 567 aa, Streptococcus pneumoniae
MALEVIMPKAGVDMTEGQIVQWNKKVGEFVKEGEILLEIMTDKVSMELEAEEDGYLIAILKGDGETVPVTEVIGYLGEERENIPTAGAASPEASPVPVASTSNDDGKSDDAFDIVVIGGGPAGYVAAIKAAQLGGKVALVEKSELGGTCLNRGCIPTKTYLHSAEIIENIGHAANRGIVIENPNFTVDMEKLLETKSKVVNTLVGGVAGLLRSYGVAVHKGIGTITKDKNVLVNGSELLETKKIILAGGSKVSKINVPGMESPLVMTSDDILEMNEVPESLVIIGGGVVGIELGQAFMTFGSKVTVIEMMDRIVPAMDVEVSKNLRLILERKGMTILTGTKLQEIIEENGQLRIKVEGKDDIIASKALLSIGRMPDLEGIGEVEFELDRGCIKVNEYMETSVPGIYAPGDINGTKMLAHAAFRMGEVSAENALKGNHAVAKLNLTPAAIYTLPEVAAVGLTEEQAREKYDVAIGKFNFAANGRAIASDAAQGFVKVIADKKYGEILGVHIIGPAAAELINEASSIIEMEITVEEMLKTIHGHPTYSEVMYEAFADVLGMAIHSPKKK

SEQ ID NO: 13564 - protein, 182 aa, Streptococcus pneumoniae
MLYPTPIAKLIDSYSKLPGIGIKTATRLAFYTIGMSADDVNEFAKNLLSAKRELTYCSICGRLTDDDPCSICTDSTRDQTTILVLEDSRDVAAMENIQEYHGLYHVLHGLISPMNGISPDDINLKSLMTRLMDSEVSEVIVATNATADGEATSMYLSRLLKPAGIKVTRLARGLAVGVDIEN

SEQ ID NO: 13565 - protein, 322 aa, Streptococcus pneumoniae; identical to SEQ ID NO: 13308

SEQ ID NO: 13566 - protein, 616 aa, Streptococcus pneumoniae
MNKKLTDYVIDLVEILNKQQKQVFWGIFDIFSMVVSIIVSYILFYGLINPAPVDYIIYTSLAFLFYQLMIGFWGLNASISRYSKITDFMKIFFGVTASSVLSYSICYAFLPLFSIRFIILFILLSTFLILLPRITWQLIYSRRKKGSGDGEHRRTFLIGAGDGGALFMDSYQHPTSELELVGILDKDSKKKGQKLGGIPVLGSYDNLPELAKRHQIERVIVAIPSLDPSEYERILQMCNKLGVKCYKMPKVETVVQGLHQAGTGFQKIDITDLLGRQEIRLDESRLGAELTGKTILVTGAGGSIGSEICRQVSRFNPERIVLLGHGENSIYLVYHELIRKFQGIDYVPVIADIQDYDRLLQVFEQYKPAIVYHAAAHKHVPMMERNPKEAFKNNIRGTYNVAKAVDEAKVSKMVMISTDKAVNPPNVMGATKRVAELIVTGFNQRSQSTYCAVRFGNVLGSRGSVIPVFERQIAEGGPVTVTDFRMTRYFMTIPEASRLVIHAGAYAKDGEVFILDMGKPVKIYDLAKKMVLLSGHTESEIPIVEVGIRPGEKLYEELLVSTELVDNQVMDKIFVGKVNVMPLESINQKIGEFRTLSGDELKQAIIAFANQTTHIE

SEQ ID NO: 13567 - protein, 176 aa, Streptococcus pneumoniae; identical to SEQ ID NO: 13414

SEQ ID NO: 13568 - protein, 79 aa, Streptococcus pneumoniae; identical to SEQ ID NO: 13416

SEQ ID NO: 13569 - protein, 239 aa, Streptococcus pneumoniae
MKIDILTLFPEMFSPLEHSIVGKAREKGLLDIQYHNFRENAEKARHVDDEPYGGGQGMLLRAQPIFDSFDAIEKKNPRVILLDPAGKQFDQAYAEDLAQEEELIFICGHYEGYDERIKTLVTDEISLGDYVLTGGELAAMTMIDATVRLIPEVIGKESSHQDDSFSSGLLEYPQYTRPYDYRGMVVPDVLMSGHHEKIRQWRLYESLKKTYERRPDLLEHYQLTVEEEKMLAEIKENKE

SEQ ID NO: 13570 - protein, 132 aa, Streptococcus pneumoniae; identical to SEQ ID NO: 13212

SEQ ID NO: 13571 - protein, 178 aa, Streptococcus pneumoniae
MSRIGNKVIVLPAGVELANNDNVVTVKGPKGELTREFSKDIEIRVEGTEITLHRPNDSKEMKTIHGTTRALLNNMVVGVSEGFKKELEMRGVGYRAQLQGSKLVLAVGKSHPDEVEAPEGITFELPNPTTIVVSGISKEVVGQTAAYVRSLRSPEPYKGKGIRYVGEFVRRKEGKTGK

SEQ ID NO: 13572 - protein, 131 aa, Streptococcus pneumoniae; identical to SEQ ID NO: 13214

SEQ ID NO: 13573 - protein, 164 aa, Streptococcus pneumoniae; identical to SEQ ID NO: 13215

SEQ ID NO: 13574 - protein, 74 aa, Streptococcus pneumoniae; identical to SEQ ID NO: 13216

SEQ ID NO: 13575 - protein, 146 aa, Streptococcus pneumoniae; identical to SEQ ID NO: 13217

SEQ ID NO: 13576 - protein, 129 aa, Streptococcus pneumoniae
MVRPTMLGESSQKIGETHKNHRRCIMSTYAIIKTGGKQVKVEVGQAVYVEKLNVEAGQEVTFNEVVLVGGENTVVGTPLVAGATVVGTVEKQGKQKKVVTYKYKPKKGSHRKQGHRQPYTKVVINAINA

SEQ ID NO: 13577 - protein, 114 aa, Streptococcus pneumoniae
MIQAVFERAEDGELRSAEITGHAESGEYGLDVVCASVSTLAINFINSIEKFAGYEPILELNEDEGGYLMVEIPKDLPSHQREMTQLFFESFFLGMANLSENYSEFVQTRVITEN

SEQ ID NO: 13578 - protein, 97 aa, Streptococcus pneumoniae; identical to SEQ ID NO: 13320

SEQ ID NO: 13579 - protein, 340 aa, Streptococcus pneumoniae
MINQIYQLTKPKFINVKYQEEAIDQENHILIRPNYMAVCHADQRYYQGKRDPKILNKKLPMAMIHESCGTVISDPTGTYEVGQKVVMIPNQSPMQSDEEFYENYMTGTHFLSSGFDGFMREFVSLPKDRVVAYDAIEDTVAAITEFVSVGMHAMNRLLTLAHSKRERIAVIGDGSLAFVVANIINYTLPESEIVVIGRHWEKLELFSFAKECYITDNIPEELAFDHAFECCGGDGTGPAINDLIRYIRPQGTILMMGVSEYKVNLNTRDALEKGLILVGSSRSGRIDFKNAIQMMEVKKFANRLKNILYLEEPVREIKDIHRVFATDLNTAFKTVFKWEV

SEQ ID NO: 13580 - protein, 306 aa, Streptococcus pneumoniae
MTKTAFLFAGQGAQYLGMGRDFYDQYPIVKETIDRASQVLGYDLRYLIDTEEDKLNQTRYTQPAILATSVAIYRLLQEKGYQPDMVAGLSLGEYSALVASGALDFEDAVALVAKRGAYMEEAAPADSGKMVAVLNTPVEVIEEACQKASELGVVTPANYNTPAQIVIAGEVVAVDRAVELLQEAGAKRLIPLKVSGPFHTALLEPASQKLAETLAQVSFSDFTCPLVGNTEAAVMQKEDIAQLLTRQVKEPVRFYESIGVMQEAGISNFIEIGPGKVLSGFVKKIDRTAHLAHVEDQASLVALLEK

SEQ ID NO: 13581 - protein, 243 aa, Streptococcus pneumoniae; identical to SEQ ID NO: 13360

SEQ ID NO: 13582 - protein, 289 aa, Streptococcus pneumoniae; identical to SEQ ID NO: 13244

SEQ ID NO: 13583 - protein, 954 aa, Streptococcus pneumoniae
MVSNNGLERTKMQDKIVIHGARAHNLKNIDVEIPRDKLVVVTGLSGSGKSSLAFDTLYAEGQRRYVESLSAYARQFLGNMEKPDVDAIDGLSPAISIDQKTTSKNPRSTVGTTTEINDYLRLLYARVGTPYCINGHGAINASSVEQIVDKVLELPERQRLQILAPVIRKKKGQHKSVIEKVQKDGYVRVRVDGEVYDVTEVPELSKSKQHNIDVVVDRIVIKEGIRSRLFDSIEAALRIAEGYVIIDTMDDSELLFSEHYACPVCGFTVPELEPRLFSFNAPFGSCSECDGLGIKLEVDTDLVVPDASKTLHEGALAPWNPISSNYYPNMLEQAMKVFGVAMDKPFEDLSEEDKNLILYGSDGKEFHFHYENEFGGVRDIDIPFEGVINNIKRRYHETNSDYTRTQMRLYMNELTCGTCQGYRLNDQALSVRVGGQQGPHIGEISDLSIADHLDLVSQLTLSENEAIIARPILKEIKDRLTFLNNVGLNYLTLSRSAGTLSGGESQRIRLATQIGSNLSGVLYILDEPSIGLHQRDNDRLIASLKKMRDLGNTLIVVEHDEDTMREADYLIDVGPGAGVFGGEIVAAGTPKQVARNSKSITGQYLSGKRVIPVPEERRVGNGRFIEVTGARENNLQNVTARFPLGKFIAVTGVSGSGKSTLINSILKKAIAQKLNRNSDKPGKFKTITGIEHVDRLIDIDQSPIGRTPRSNPATYTGVFDDIRDLFAQTNEAKIRGYKKGRFSFNVKGGRCEACSGDGIIKIEMHFLPDVYVACEVCHGTRYNSETLEVHYKEKNISQVLDMTVNDAVEFFQHIPKIQRKLQTIKDVGLGYVTLGQPATTLSGGEAQRMKLASELHKRSTGKSFYILDEPTTGLHTEDIARLLKVLARFVDAGNTVLVIEHNLDVIKTADHIIDLGPEGGVGGGTIIVTGTPEEVAANEASYTGHYLKGKLHHE

SEQ ID NO: 13584 - protein, 141 aa, Streptococcus pneumoniae
MDFLLFYDSKKKGDTMTYLEKWFDFNRRQKEIESLLEETIAQQSEQSLTLKEFYLLYYLDLAEEKSLRQIDLPDKLHLSPSAVSRMVARLEAKNCGLLSRMCCHQDRRSSFICLTNDGQKTLASLQKTVEESLEAGLDFLI

SEQ ID NO: 13585 - protein, 418 aa, Streptococcus pneumoniae; identical to SEQ ID NO: 13462

SEQ ID NO: 13586 - protein, 267 aa, Streptococcus pneumoniae
MTQDLQKRTLFAGIALAIFLPILMIGGLLLQIAIGIIAMLAMHELLKIRGLATMTMEGLLTLFATFALTIPLENYLTFLPVDGNVVAYSVLISIMLGTTVFSKSYTIEDAVFPLAMSFYVGFGFNALLDARVAGLDKALLALCIVWATDSGAYLVGMNYGKRKLAPRVSPNKTLEGALGGILGAILVTIIFMIVDSTVALPYGIYKMSVFAIFFSIAGQFGDLLESSIKRHFGVKDSGKFIPGHGGVLDRFDSMLLVFPIMHLFGLF

SEQ ID NO: 13587 - protein, 170 aa, Streptococcus pneumoniae; identical to SEQ ID NO: 13246

SEQ ID NO: 13588 - protein, 122 aa, Streptococcus pneumoniae; identical to SEQ ID NO: 13247

SEQ ID NO: 13589 - protein, 429 aa, Streptococcus pneumoniae
MGLFDRLFGKKEEPKIEEVVKEALENLDLSEDVDPTFTEVEEVPQEEAEVEIVEQAVFQEEEIQDTVEESQDSEPAVGVSQEEIEELPNSEELPEEEKLEHEGTVEENNSEVLEPERPQTEETVQEKYDRSLKKTRTGFGARLNAFFANFRSVDEEFFEELEELLIMSDVGVQVASNLTEELRYEAKLENAKKPDALRRVIIEKLVELYEKDGSYDESIHFQDNLTVMLFVGVNGVGKTTSIGKLAHRYKRTGKKVMLVAADTFRAGAVAQLAEWGRRVDVPVVTGPEKADPASVIFDGMERAVAEGIDILMIDTAGRLQNKDNLMAELEKIGRIIKRVVPEAPHETFLALDASTGQNALVQAKEFSKITPLTGIVLTKIDGTARGGVVLAIREELNIPVKLIGFGEKIDDIGEFNSENFMKGLLEGLI

SEQ ID NO: 13590 - protein, 447 aa, Streptococcus pneumoniae; identical to SEQ ID NO: 13412

SEQ ID NO: 13591 - protein, 397 aa, Streptococcus pneumoniae
MSERKLFTSESVSEGHPDKIADQISDAILDAILAKDPEAHVAAETAVYTGSVHVFGEISTNAYVDINRVVRDTIAEIGYTNTEYGFSAETVGVHPSLVEQSPDIAQGVNEALEVRGNADQDPLDLIGAGDQGLMFGFAVDETEELMPLPIALSHKLVRRLAELRKSGEISYLRPDAKSQVTVEYDENDRPVRVDTVVISTQHDPEATNEQIHQDVINKVIKEVIPSSYLDDKTKFFINPTGRFVIGGPQGDSGLTGRKIIVDTYGGYSRHGGGAFSGKDATKVDRSASYAARYIAKNIVAAGLAKKAEVQLAYAIGVAQPVSVRIDTFGTGTVAESQLEKAARQIFDLRPAGIIQMLDLKRPIYRQTSAYGHMGRTDIDLPWERLDKVDALKEAVKN

SEQ ID NO: 13592 - protein, 334 aa, Streptococcus pneumoniae
MKEIIEKLAKFENLSGVEMTDVIERIVTGRVTEAQIASLLLALKMKGETPEERTAIAQVMRGHAQHIPTEIHDAMDNCGTGGDKSFSFNISTTAAFVLAGGGIHMAKHGNRSISSKSGSADVLEALGINLDLKPAELGKVFDKTGIVFLFAKNMHPAMKYIMPARLELGIPTIMNLTGPLIHPMALETQLLGISRPELLESTAQVLKNMGRKRAIVVAGPEGLDEAGLNGTTKIALLENGEISLSSFTPEDLGMEDYAMEDIRGGNAQENAEILLSVLKNEASPFLETTVLNAGLGFYANGKIDSIKEGVALARQVIARGKALEKLRLLQEYQK

SEQ ID NO: 13593 - protein, 359 aa, Streptococcus pneumoniae
MICSDSSYSFHNKNFMIFIRRKSLMVVKVGINGFGRIGRLAFRRIQNVEGVEVTRINDLTDPVMLAHLLKYDTTQGRFDGTVEVKEGGFEVNGKFVKVSAERDPEQIDWATDGVEIVLEATGFFAKKEAAEKHLKGGAKKVVITAPGGNDVKTVVFNTNHDVLDGTETVISGASCTTNCLAPMAKALQDNFGVVEGLMTTIHAYTGDQMILDGPHRGGDLRRARAGAANIVPNSTGAAKAIGLVIPELNGKLDGSAQRVPTPTGSVTELVAVLEKNVTVDEVNAAMKAASNESYGYTEDPIVSSDIVGMSYGSLFDATQTKVLDVDGKQLVKVVSWYDNEMSYTAQLVRTLEYFAKIAK

SEQ ID NO: 13594 - protein, 872 aa, Streptococcus pneumoniae
MKQLSSAQVRQMWLDFWATKAHSVEPSVSLVPVNDPTLLWINSGVATLKKYFDGTIIPENPRITNAQKAIRTNDIENVGKTARHHTMFEMLGNFSIGDYFRDEAITWAYELLTSPEWFDFPAEKLYMTYYPDDKDSYNRWIEVGVDPSHLIPIEDNFWEIGAGPSGPDTEIFFDRGEAFDPENIGLRLLAEDIENDRYIEIWNIVLSQFNADPAVPRSEYKELPHKNIDTGAGLERLVAVIQGAKTNFETDLFMPIIREVEKLSGKVYDQDGDNMSFKVIADHIRSLSFAIGDGALPGNEGRGYVLRRLLRRASMHGQKLGINEPFLYKLVPTVGKIMESYYPEVLEKRDFIEKIVKSEEESFARTLHSGQHFAQGIVADLKEKGQSVIAGSDVFKLYDTYGFPVELTEEIAEEAGMTVDREGFEAAMKEQQERARASAVKGGSMGMQNETLQNITVESVFNYNASQLSSKLVAIVADNAEVEAVSEGTASLIFAETSFYAEMGGQVADYGQILDESGKVVATVTNVQKAPNGQALHTVEVLAPLALNQEYTLAIDSNRRHRVMKNHTATHLLHAALHNILGNHATQAGSLNEVEFLRFDFTHFQAVTAEELRAIEQQVNEKIWEALEVKTVETDIDTAKEMGAMALFGEKYGKEVRVVTIGDYSIELCGGTHVGNTSEIGLFKIVKEEGIGSGTRRILAVTGKEAFEAYREQEDALKAVAAILKAPQVKEVPHKVEGLQEQLRQLQKENAELKEKAAAAAAGDIFKDAKEVNGHRYIASQVSVSDAGALRTFADNWKQKDYSDLLVLVAAIGDKVNVLVASKTKDLHAGNLVKELAPIIDGRGGGKPDMAMAGGSNQAKIQELLDAVAGKL

SEQ ID NO: 13595 - protein, 166 aa, Streptococcus pneumoniae; identical to SEQ ID NO: 13372

SEQ ID NO: 13596 - protein, 340 aa, Streptococcus pneumoniae; identical to SEQ ID NO: 13373

SEQ ID NO: 13597 - protein, 291 aa, Streptococcus pneumoniae
MKKQEKLALVESALEDFYGDQQFASSLRESVLYSIHAGGKRIRPFLLLEVLEALQVTIKPAHAQVATALEMIHTGSLIHDDLPAMDDDDYRRGRLTNHKKFGEAMAILAGDALFLDPYALIAQADLPSQIKVDLIANLSLASGSLGMVAGQVLDMEGEHQHLSLEELQIIHANKTGKLLAYPFQAAAIIAELSPEMQVKLKTVGELIGLAFQVRDDVLDVTASFEEIGKTPQKDLQAEKSTYPALLGLEESIAFCNQTLDQANEKLEEIAQQLPFETESIVSVVESLRING

SEQ ID NO: 13598 - protein, 767 aa, Streptococcus pneumoniae
MANKNTSTTRRRPSKAELERKEAIQRMLISLGIAILLIFAAFKLGAAGITLYNLIRLLVGSLAYLAIFGLLIYLFFFKWIRKQEGLLSGFFTIFAGLLLIFEAYLVWKYGLDKSVLKGTMAQVVTDLTGFRTTSFAGGGLIGVALYIPTAFLFSNIGTYFIGSILILVGSLLVSPWSVYDIAEFFSRGFAKWWEGHERRKEERFVKQEEKARQKAEKEARLEQEETEKALLDLPPVDMETGEILTEEAVQNLPPIPEEKWVEPEIILPQAELKFPEQEDDSDDEDVQVDFSAKEALEYKLPSLQLFAPDKPKDQSKEKKIVRENIKILEATFASFGIKVTVERAEIGPSVTKYEVKPAVGVRVNRISNLSDDLALALAAKDVRIEAPIPGKSLIGIEVPNSDIATVSFRELWEQSQTKAENFLEIPLGKAVNGTARAFDLSKMPHLLVAGSTGSGKSVAVNGIIASILMKARPDQVKFMMVDPKMVELSVYNDIPHLLIPVVTNPRKASKALQKVVDEMENRYELFAKVGVRNIAGFNAKVEEFNSQSEYKQIPLPFIVVIVDELADLMMVASKEVEDAIIRLGQKARAAGIHMILATQRPSVDVISGLIKANVPSRVAFAVSSGTDSRTILDENGAEKLLGRGDMLFKPIDENHPVRLQGSFISDDDVERIVNFIKTQADADYDESFDPGEVSENEGEFSDGDAGGDPLFEEAKSLVIETQKASASMIQRRLSVGFNRATRLMEELEMAGVIGPAEGTKPRKVLQQ

SEQ ID NO: 13599 - protein, 255 aa, Streptococcus pneumoniae; identical to SEQ ID NO: 13498

SEQ ID NO: 13600 - protein, 399 aa, Streptococcus pneumoniae
MRLMQMPSEFQKALPVLEKIKEAGFEAYFVGGSVRDALLHSPIHDVDIATSSYPEETKQIFPRTADIGIEHGTVLVLDGDEEYEVTTFRTEDVYVDYRRPSAVSFVRSLEEDLKRRDFTVNAFALDETGEIVDLFHGLEDLEKQVLRAVGVASERFNEDALRIMRGFRFQASLGFALEPETFKAMKTLTPLLEKISVERTFVEFDKLLLAPFWRRGLASMIESQAYDYLPDMASSQDKLNRLFDLETDFTFESSEQAWAALLWALEIENAQSFLKSWKTSRQFAKQVQDLLIILALRENGELSKRDCYRFDLDLLLQAENLRQAQGKEVNPQVIKETYQSLTIHDKKEIQINGGILIKEYGYQPGPDLGEILTEIEFAIVDGELENNREAIHAYLREKK

SEQ ID NO: 13601 - protein, 232 aa, Streptococcus pneumoniae
MTKRVLITGVSSGIGLAQARLFLEKGYQVYGVDQGEKPLLEGDFHFLQRDLTLDLEPIFDWCPQVDVLCNTAGVLDAYKPLLEQTAQDIQEIFEINYIIPVELTRYYLTQMLENKKGIIINMCSIASSLAGGGGHAYTSSKHALAGFTKQLALDYAEAGIQVFGIAPGAVKTAMTAADFEPGGLADWVASETPIKRWIEPEEIAELSLFLASGKASAMQGQILTIDGGWSLK

SEQ ID NO: 13602 - protein, 276 aa, Streptococcus pneumoniae
MTIQMKNTGKRIDLIANRKPQSQRVLYELRDRLKRNQFILNDTNPDIVISIGGDGMLLSAFHKYENQLEKVRFIGLHTGHLGFYTDYRDFELDKLVTNLQLDTGARVSYPVLNVKVFLENGEVKIFRALNEASIRRSDRTMVADIVINGVPFERFRGDGLTVSTPTGSTAYNKSLGGAVLHPTIEALQLTEIASLNNRVYRTLGSSIIVPKKDKIELIPTRNDYHTISVDNSVYSFRNIERIEYQIAHHKIHFVATPSHTSFWNRVKDAFIGEVDE

SEQ ID NO: 13603 - protein, 298 aa, Streptococcus pneumoniae; identical to SEQ ID NO: 13325

SEQ ID NO: 13604 - protein, 324 aa, Streptococcus pneumoniae; identical to SEQ ID NO: 13324

SEQ ID NO: 13605 - protein, 100 aa, Streptococcus pneumoniae; identical to SEQ ID NO: 13369

SEQ ID NO: 13606 - protein, 488 aa, Streptococcus pneumoniae; identical to SEQ ID NO: 13368

SEQ ID NO: 13607 - protein, 510 aa, Streptococcus pneumoniae
MRGSFMFKVLQKVGKAFMLPIAILPAAGLLLGIGGALSNPTTIATYPILDNSIFQSIFQVMSSAGEVVFSNLSLLLCVGLCIGLAKRDKGTAALAGVTGYLVMTATIKALVKLFMAEGSAIDTGVIGALAVGIVAVYLHNRYNNIQLPSALGFFGGSRFVPIVTSFSSILIGFVFFVIWPPFQQLLVSTGGYISQAGPIGTFLYGFLMRLSGAVGLHHIIYPMFWYTELGGVETIAGQTVVGAQKIFFAQLADPAHSGLFTEGTRFFAGRFSTMMFGLPAACLAMYHSVPKNRRKKYAGLFFGVALTSFITGITEPIEFMFLFVSPVLYVVHAFLDGVSFFIADVLNISIGNTFSGGVIDFTLFGILQGNAKTNWVLQIPIGLIWSVLYYIIFRWFITQFNVLTPGRGEEVDSKEISESADSTSNTADYLKQDSLQIIRALGGSNNIEDVDACVTRLRVAVKEVNQVDKALLKQIGAVDVLEVKGGIQAIYGAKAILYKNSINEILGVDD

SEQ ID NO: 13608 - protein, 1179 aa, Streptococcus pneumoniae
MYLKEIEIQGFKSFADKTKVVFDQGVTAVVGPNGSGKSNITESLRWALGESSVKSLRGGKMPDVIFAGTESRKPLNYASVVVTLDNHDGFIKDAGQEIRVERHIYRSGDSEYKIDGKKVRLRDIHDLFLDTGLGRDSFSIISQGKVEEIFNSKPEERRAIFEEAAGVLKYKTRRKETESKLQQTQDNLDRLEDIIYELDNQIKPLEKQAENARKFLDLEGQRKAIYLDVLVAQIKDNKAELDSTEEELAQVQELLTSYYQKREKLEEENQTLKKQRQDLQAEMAKDQGSLMDLTSLISDLERKLALSKLESEQVALNQQEAQARLATLEDKRSSLSQEKSDKESSLALLEGNLVQNNQKLNRLEAELLAFSDDPDQMIELLRERFVALLQEEADVSNQLTRIENELENSRQLSQKQADQLEKLKEQLAIAKEKASQQKEELETAKEQVQKLLADYQAIAKEQEEQKTSYQAQQSQLFDRLDNLKNKQARAQSLENILRNHSNFYAGVKSVLQEKDRLGGIIGAVSEHLTFDMHYQTALEIALGASSQHIIVEDENAATKAIDFLKRNRAGRATFLPLTTIKARTISSQNQDAIAVSPGFLGMADELVTFDTRLEAIFKNLLATTAIFDTVEHAREAARQVRYQVRMVTLDGTELRTGGSYAGGANRQNNSIFIKPELEQLQKEIAEEEASLDSEEVALKTLQDEMARLTESLEAIKSQGEQARIQEQGLFLAYQQTSQQVEELETLWKLQEEEIDRLSEGDWQADKENCQERLAAIASDKQNLEAEIEEIKSNKNAIQERYQNLQEELAQARLLKTELQGQKRYEVADIERLGKELDNLNIEQEEIQRMLQEKVDNLEKVDTDLLNQQAEEAKTQKTNLQQGLIRKQFELDDIEGQLDDIASHLDQARQQNEEWIRKQTRAEAKKEKVSERLRHLQSQLTDQYQISYTEALEKAHELENLNLAEQEVKDLEKAIRSLGPVNIEAIDQYEEVYNRLDFLNSQRDDILSAKNLLLETITEMNDEVKERFKSTFEAIRESFKVTFKQMFGGGQADLILTEGDLLTAGVEISVQPPGKKIQSLNLMSGGEKALSALALLFSIIRVKTIPFVILDEVEAALDEANVKRFGDYLNRFDKDSQFIVVTHRKGTMAAADSIYGVTMQESGVSKIVSVKLKDLESIEG

SEQ ID NO: 13609 - protein, 241 aa, Streptococcus pneumoniae
MRINKYIAHAGVASRRKAEELIKQGLVTVNGQVVRELATTIKSGDKVEVEGQPIYNEEKVYYLLNKPRGVISSVTDDKGRKTVVDLLPNVKERIYPVGRLDWDTSGVLILTNDGDFTDEMIHPRNEIDKVYVARVKGVANKDNLRPLTRGLEIDGKKTKPAVYEILKVDPVKNRSVVQLTIHEGRNHQVKKMFEAVGLQVDKLSRTRFGHLDLTGLRPGESRRLNKKEISQLHTMAVTKKN

SEQ ID NO: 13610 - protein, 68 aa, Streptococcus pneumoniae
MSVEEKLNQAKGSIKEGVGKAIGDEKMEKEGAAEKVVSKVKEVAEDAKDAVEGAVEGVKNMLSGDDKN

SEQ ID NO: 13611 - protein, 438 aa, Streptococcus pneumoniae
MLTYDLIVIGFGKAGKTLAGKLASAGKKVALVERSKAMYGGTCINIGCIPTKTLLVAAEKDLSFEEVIATKNTITGRLNGKNYATVAGTGVDIFDAEAHFLSNKVIEIQAGDEKKELTAETIVINTGAVSNVLPIPGLATSKNIFDSTGIQSLDKLPEKLGILGGGNIGLEFAGLYNKLGSKVTVLDALDTFLPRAEPSIAALAKQYMEEDGIELLQNIHTTEIKNDGDQVLVVTEDETYRFDALLYATGRKPNVEPLQLENTDIELTERGAIKVDKHCQTNVPGVFAVGDVNGGLQFTYISLDDFRVVYSYLAGDGSYTLEDRLNVPNTMFITPALSQVGLTESQAADLKLPYAVKEIPVAAMPRGHVNGDLRGAFKAVVNTETKEILGASIFSEGSQEIINIITVAMDNKIPYTYFTKQIFTHPTLAENLNDLFAI

SEQ ID NO: 13612 - protein, 447 aa, Streptococcus pneumoniae; identical to SEQ ID NO: 13490

SEQ ID NO: 13613 - protein, 260 aa, Streptococcus pneumoniae
MVYTSLSSKDSNYPYQLNIAHLYGNLMNTYGDNGNILMLKYVAEKLGAHVTVDIVSLHDDFDENHYDIAFFGGGQDFEQSIIADDLPAKKESIDNYIQNDGVVLAICGGFQLLGQYYVEASGKRIEGLGVMGHYTLNQTNNRFIGDIKIHNEDFDETYYGFENHQGRTFLSDDQKPLGQVVYGNGNNEEKVGEGVHYKNVFGSYFHGPILSRNANLAYRLVTTALKKKYGQDIQLPAYEDILSQEIAEEYSDVKSKADFS

SEQ ID NO: 13614 - protein, 351 aa, Streptococcus pneumoniae
MLERMNKYMNTADFDFHLPEELIAQTPLEKRDASKLLIVNRETGEMQDKHFHSIIDMLEPGDALVMNDTRVLPARLYGQKVETGGHVELLLLKNTSGDEWEVLAKPAKRLKVGTRISFGDGRLSAVVTEELTHGGRIVRFEYQGIFLEVLESLGEMPLPPYIHEKLDDRERYQTVYAKESGSAAAPTAGLHFTKELLAEIQAKGVHLVYLTLHVGLGTFRPVSVDNLDEHEMHSEFYQLSEEAAATLRSVKENGGRVIAVGTTSIRTLETIGSKFDGQIQADSGWTNIFIKPGYEWKVVDAFSTNFHLPKSTLVMLVSAFAGRELVLDAYHHAIQEHYRFFSFGDAMFIYN

SEQ ID NO: 13615 - protein, 161 aa, Streptococcus pneumoniae; identical to SEQ ID NO: 13363

SEQ ID NO: 13616 - protein, 140 aa, Streptococcus pneumoniae
MIDIQGIKEALPHRYPMLLVDRVLEVSEDTIVAIKNVTINEPFFNGHFPQYPVMPGVLIMEALAQTAGVLELSKPENKGKLVFYAGMDKVKFKKQVVPGDQLVMTATFVKRRGTIAVVEAKAEVDGKLAASGTLTFAIGN

SEQ ID NO: 13617 - protein, 455 aa, Streptococcus pneumoniae
MFRKILIANRGEIAVRIIRAARELGIATVAVYSTADKEALHTLLADEAVCIGPGKATESYLNINAVLSAAVLTEAEAIHPGFGFLSENSKFATMCEEVGIKFIGPSGHVMDMMGDKINARAQMIKAGVPVIPGSDGEVHNSEEALIVAEKIGYPVMLKASAGGGGKGIRKVEKPDDLVSAFETASSEAKANYGNGAMYIERVIYPARHIEVQILGDEHGHVIHLGERDCSLQRNNQKVLEESPSIAIGKTLRHEIGAAAVRAAEFVGYENAGTIEFLLDEASSNFYFMEMNTRVQVEHPVTEFVSGVDIVKEQICIAAGQPLSVKQEDIVLRGHAIECRINAENPAFNFAPSPGKITNLYLPSGGVGLRVDSAVYPGYTIPPYYDSMIAKIIVHGENRFDALMKMQRALYELEIEGVQTNADFQLDLISDRNVIAGDYDTSFLMETFLPKYQEKE

SEQ ID NO: 13618 - protein, 288 aa, Streptococcus pneumoniae; identical to SEQ ID NO: 13365

SEQ ID NO: 13619 - protein, 255 aa, Streptococcus pneumoniae; identical to SEQ ID NO: 13366

SEQ ID NO: 13620 - protein, 105 aa, Streptococcus pneumoniae; identical to SEQ ID NO: 13275

SEQ ID NO: 13621 - protein, 320 aa, Streptococcus pneumoniae; identical to SEQ ID NO: 13278

SEQ ID NO: 13622 - protein, 247 aa, Streptococcus pneumoniae
MQQYFVKGSAISPVTIEDKEISKHMFQVMRLKEEDEVTLVFDDGIKRLARVLDMENRQFELVQELNDNVELPVQVTIASGFPKGDKLEFIAQKVTELGASQIWAFPADWSVAKWDGKKLGKKVEKLEKIALGAAEQSKRNIVPSIKLFEKKADFLAQLDQFDSIIVAYEESAKEGEAAALLQAVTGLETGAKLLFIFGPEGGLSPAEIESFEAKGAVLAGLGPRILRAETAPLYALSALSVLVELEK

SEQ ID NO: 13623 - protein, 318 aa, Streptococcus pneumoniae; identical to SEQ ID NO: 13410

SEQ ID NO: 13624 - protein, 428 aa, Streptococcus pneumoniae; identical to SEQ ID NO: 13284

SEQ ID NO: 13625 - protein, 591 aa, Streptococcus pneumoniae
MTQGKITASAAMLNVLKTWGVDTIYGIPSGTLSSLMDALAEDKDIRFLQVRHEETGALAAVMQAKFGGSIGVAVGSGGPGATHLINGVYDAAMDNTPFLAILGSRPVNELNMDAFQELNQNPMYNGIAVYNKRVAYAEQLPKVIDEACRAAISKKGPAVVEIPVNFGFQEIDENSYYGSGSYERSFIAPALNEVEIDKAVEILNNAERPVIYAGFGGVKAGEVITELSRKIKAPIITTGKNFEAFEWNYEGLTGSAYRVGWKPANEVVFEADTVLFLGSNFPFAEVYEAFKNTEKFIQVDIDPYKLGKRHALDASILGDAGQAAKAILDKVNPVESTPWWRANVKNNQNWRDYMNKLEGKTEGELQLYQVYNAINKHADQDAIYSIDVGNTTQTSTRHLHMTPKNMWRTSPLFATMGIALPGGIAAKKDNPDRQVWNIMGDGAFNMCYPDVITNVQYDLPVINLVFSNAEYGFIKNKYEDTNKHLFGVDFTNADYAKIAEAQGAVGFTVDRIEDIDAVVAEAVKLNKEGKTVVIDARITQHRPLPVEVLELDPKLHSEEAIKAFKEKYEAEELVPFRLFLEEEGLQSRAIK

SEQ ID NO: 13626 - protein, 315 aa, Streptococcus pneumoniae
MSEPLFLQSVMQEKIWGGAKLRDEFGYDIPSEKIGEYWAISAHPNGVSKVANGRYEGTDLATLYAEHRELFGNRPEPVFPLLTKILDANDWLSVQVHPDDAYGLEHEGELGKTECWYIIAADEGSEIIYGHNAKSKEELRQQIEDKNWDDLLTKVPVKAGDFFYVPSGTMHAIGAGILILETQQSSDTTYRVYDFDRKDDKGNLRELHLEKSIDVLNIGEPANSRPVTVKADDLRSTLLVSNDFFAVYKWEITGKVDFEKTADYSLLSVLAGQGQLTVDGKNYPIQKGRHFILPSDVEAWTLEGQGLELIVSHPN

SEQ ID NO: 13627 - protein, 511 aa, Streptococcus pneumoniae; identical to SEQ ID NO: 13167

SEQ ID NO: 13628 - protein, 410 aa, Streptococcus pneumoniae; identical to SEQ ID NO: 13393

SEQ ID NO: 13629 - protein, 238 aa, Streptococcus pneumoniae; identical to SEQ ID NO: 13508

SEQ ID NO: 13630 - protein, 164 aa, Streptococcus pneumoniae; identical to SEQ ID NO: 13509

SEQ ID NO: 13631 - protein, 477 aa, Streptococcus pneumoniae
MTETGVVTYIGDGIARAHGLENVMSGELLNFENGSYGMAQNLESTDVGIIILGDFTDIREGDTIRRTGKIMEVPVGESLIGRVVDPLGRPVDGLGEIHTDKTRPVEAPAPGVMQRKSVSEPLQTGLKAIDALVPIGRGQRELIIGDRQTGKTTIAIDTILNQKDQDMICIYVAIGQKESTVRTQVETLRQYGALDYTIVVTASASQPSPLLFLAPYTGVAMAEEFMYQGKHVLIVYDDLSKQAVAYRELSLLLRRPPGREAFPGDVFYLHSRLLERSAKVSDELGGGSITALPFIETQAGDISAYIATNVISITDGQIFLGDGLFNAGIRPAIDAGSSVSRVGGSAQIKAMKKVAGTLRIDLASYRELEAFTKFGSDLDAATQAKLNRGRRTVEVLKQPVHKPLPVEKQVTILYALTHGFLDTVPVDDIVRFEEEFHAFFDAQHPEILETIRDTKDLPEEAVLDAAITEFLNQSSFQ

SEQ ID NO: 13632 - protein, 390 aa, Streptococcus pneumoniae
MVVMNRIRVSKRVEKKLAKGLVLLEASDLENVNLKDQEVEVQGQEGNFLGTAYLSQQNKGLGWFVSKDKVAFNQTFFETLFRKAKEKRNAYYQDDLTTAFRLFNQEGDGFGGLTVDLYGDYAVFSWYNSYVYQIRQTISEAFRQVFPEVLGAYEKIRFKGFDYESAHVYGQEAPDFFTVLENGVLYQVFMNDGLMTGIFLDQHEVRGSLVDGLAMGKSLLNMFSYTAAFSVAAAMGGASQTTSVDLAKRSRELSQAHFQANGLSTDEHRFIVMDVFEYFKYAKRKDLTYDVIVLDPPSFARNKKQTFSVAKDYHKLISQSLEILNPGGIIIASTNAANVSRQKFTEQIDKGFAGRSYQILNKYGLPADFAYNKKDESSNYLKVISMKVSK

SEQ ID NO: 13633 - protein, 450 aa, Streptococcus pneumoniae
MKVIDQFKNKKVLVLGLAKSGESAARLLDKLGAIVTVNDGKPFEDNPAAQCLLEEGIKVITGGHPLELLDEEFALMVKNPGIPYSNPMIEKALAKGIPVLTEVELAYLISEAPIIGITGSNGKTTTTTMIGEVLTAAGQHGLLSGNIGYPASQVAQIASDKDTLVMELSSFQLMGVQEFHPEIAVITNLMPTHIDYHGSFSEYVAAKWNIQNKMTAADFLVLNFNQDLAKDLTSKTEATVVPFSTLEKVDGAYLEDGQLYFRGEVVMAANEIGVPGSHNVENALATIAVAKLRDVDNQTIKETLSAFGGVKHRLQFVDDIKGVKFYNDSKSTNILATQKALSGFDNSKVVLIAGGLDRGNEFDELVPDITGLKKMVILGQSAERVKRAADKAGVAYVEATDIADATRKAYELATQGDVVLLSPANASWDMYANFEVRGDLFIDTVAELKE

SEQ ID NO: 13634 - protein, 352 aa, Streptococcus pneumoniae
MKKIVFTGGGTVGHVTLNLLLMPKFIEDGWEVHYIGDKRGIEHQEILKSGLDVTFHSIATGKLRRYFSWQNMLDVFKVGWGIVQSLFIMLRLRPQILFSKGGFVSVPPVIAARVSGVPVFIHESDLSMGLANKIAYKFATKMYSTFEQASSLSKVEHVGAVTKVSDQKNPEPDELVDIQTHFNHKLPTVLFVGGSAGARVFNQLVTDHKKELTERYNIINLTGDSSLNELSQNLFRVDYVTDLYQPLLELADIVVTRGGANTIFELLAIAKLHVIVPLGREASRGDQIENAAYFVKKGYAEDLQESDLTLDSLEEKLSHLLSHKEDYQAKMKASKELKSLADFYQLLKKDLS

SEQ ID NO: 13635 - protein, 339 aa, Streptococcus pneumoniae; identical to SEQ ID NO: 13235

SEQ ID NO: 13636 - protein, 810 aa, Streptococcus pneumoniae
MNYSKALNECIESAYMVAGHFGARYLESWHLLIAMSNHSYSVAGATLNDYPYEMDRLEEVALELTETDYSQDETFTELPFSRRLQVLFDEAEYVASVVHAKVLGTEHVFYAILHDGNALATRILERAGFSYEDKKDQVKIAALRRNLEERAGWTREDLKALRQRHRTVADKQNSMANMMGMPQTPSGGLEDYTHDLTEQARSGKLEPVIGRDKEISRMIQILSRKTKNNPVLVGDAGVGKTALALGLAQRIASGDVPAEMAKMRVLELDLMNVVAGTRFRGDFEERMNNIIKDIEEDGQVILFIDELHTIMGSGSGIDSTLDAANILKPALARGTLRTVGATTQEEYQKHIEKDAALSRRFAKVTIEEPSVADSMTILQGLKATYEKHHRVQITDEAVETAVKMAHRYLTSRHLPDSAIDLLDEAAATVQNKAKHVKADDSDLSPADKALMDGKWKQAAQLIAKEEEVPVYKDLVTESDILTTLSRLSGIPVQKLTQTDAKKYLNLEAELHKRVIGQDQAVSSISRAIRRNQSGIRSHKRPIGSFMFLGPTGVGKTELAKALAEVLFDDESALIRFDMSEYMEKFAASRLNGAPPGYVGYEEGGELTEKVRNKPYSVLLFDEVEKAHPDIFNVLLQVLDDGVLTDSKGRKVDFSNTIIIMTSNLGATALRDDKTVGFGAKDIRFDQENMEKRMFEELKKAYRPEFINRIDEKVVFHSLSSDHMQEVVKIMVKPLVASLAEKGIDLKLQASALKLLANQGYDPEMGARPLRRTLQTEVEDKLAELLLKGDLVAGSILKIGVKAGQLKFDIA

SEQ ID NO: 13637 - protein, 666 aa, Streptococcus pneumoniae
MTLMDHCELSLYELSVKVSLPIKEVKEGIDYLVPYLANKGIVLDKKQGRYSLSNRTKQSLTDIIKSDELVLPKSTRLALIYLYTFCRLDFISNNHYQDFLKVSKNTTLSDIQSLRKIMLDNDLELGYSRAKGYTLHGSEWNKHRLAFQMVSELLESSIGIWGLDYVLSSWGYSLTYDLINQVVKDYYEKLQLVPIVNQLKVYLFGLVFILCRYQRDVERVCLSETLVSPVIQDITTILLDTVVDLGIIDTVFSEDDYRYITVLLSSCFEGEVDVAPVYFNQLTEAIISRMEDISLLHFKQREGLRENLRRHLIPAYYRLKFGLPSSNEYVLHVKEHYPDLFELVKDSLMPLMDAIDNPIPDSETAYFVIHFGGYLKKADTLPQKCYKAAIICPNGVSSSLMLKENLLALFPQIEFIGTSKIDDLQVKVSSDYDMVFSTIKVETEKPNYLVSVMMTEEQAIQLVELVLKDFPNLEYGDFEIEQILNIVKRYGIITQELELRLALKNYLYQKNDRKEIVPVLEQLITKETYQVSSQKLGWKEAIRLAAKPLLDQDKITENYPEAMIQKVEEFGPFINLGKGVAIPHARPDEGVNEIGMSMLVLEEPIYLLDNPEQEVRLLICIAAIDNESHLKALSHLTTILRDKNHVQTLISSKNYDDIKMIIKQED

SEQ ID NO: 13638 - protein, 317 aa, Streptococcus pneumoniae
MSISQRTTKLILATCLACLFAYFLNLSSAVSAGIIALLSLSDTRRSTLKLARNRLFSMLLALAIGVLAFHLSGFHIWSLGLYLAFYVPLAYKMGWEIGITPSTVLVSHLLVQESTSPDLLVNEFLLFAIGTGFALLVNLYMPSREKKIQHYHTLVEEKLKDILQRFKYYLSRGDGRNRAQLVAELDTLLKEALRLVYLDHSDHLFHQTDYHIHYFEMRQRQSRILRNMAQQINTCHLAASESLILAQLFSKIAGQLSQTNPASDLLDEIERYLEVFRNRSLPKTREEFETRATLLQLLREAKTFIQVKVDFYQKYRQ

SEQ ID NO: 13639 - protein, 431 aa, Streptococcus pneumoniae; identical to SEQ ID NO: 13180

SEQ ID NO: 13640 - protein, 427 aa, Streptococcus pneumoniae
MTKVVFEEKYYPAVKEKVYRTRLANGLTVALLPKKEFKEVYGSVTVQFGSVDTFVTEVDGDVKQYPGGIAHFLEHKLFEREDSSDLMSAFTSLGADSNAFTSFTKTNYLFSATDYFLENLDLLDELVTSAHFTEASILTEQDIIQQEREMYQDDPDSCLFFSTLANLYPGTPLATDIVGSEESISQINLTNLQENFTKFYKPVNMSLFLVGNFDVERVQDYFESKELKDSDFQEVAREKLFLQPVKPTDSMRMEVSSPKLAIGVRGKREVSEADCYRHHILLKLLFAMMFGWTSDRFQKCYESGKIDASLSLEVEVTSRFHFVMLTMDTKEPVALSHQFRKAIRNFTKDLDITEEHLDIIKREMFGEFFSSMNSLEFIATQYDAFENGETIFDLPKILQEITLEDVLDAGHHLIDDGDIVDFTIFPS

SEQ ID NO: 13641 - protein, 305 aa, Streptococcus pneumoniae
MSKKLTFQEIILTLQQFWNDQGCMLMQAYDNEKGAGTMSPYTFLRAIGPEPWNAAYVEPSRRPADGRYGENPNRLYQHHQFQVVMKPSPSNIQELYLESLEKLGINPLEHDIRFVEDNWENPSTGSAGLGWEVWLDGMEITQFTYFQQVGGLATSPVTAEVTYGLERLASYIQEVDSVYDIEWADGVKYGEIFIQPEYEHSKYSFEISDQEMLLENFDKFEKEAGRALEEGLVHPAYDYVLKCSHTFNLLDARGAVSVTERAGYIARIRNLARVVAKTFVAERKRLGYPLLDEETRVKLLAEDAE

SEQ ID NO: 13642 - protein, 437 aa, Streptococcus pneumoniae
MSMFLDTAKIKVKAGNGGDGMVAFRREKYVPNGGPWGGDGGRGGNVVFVVDEGLRTLMDFRYNRHFKADSGEKGMTKGMHGRGAEDLRVRVPQGTTVRDAETGKVLTDLIEHGQEFIVAHGGRGGRGNIRFATPKNPAPEISENGEPGQERELQLELKILADVGLVGFPSVGKSTLLSVITSAKPKIGAYHFTTIVPNLGMVRTQSGESFAVADLPGLIEGASQGVGLGTQFLRHIERTRVILHIIDMSASEGRDPYEDYLAINKELESYNLRLMERPQIIVANKMDMPESQENLEEFKKKLSENYDEFEELPAIFPISGLTKQGLATLLDATAELLDKTPEFLLYDESDMEEEAYYGFDEEEKAFEISRDDDATWVLSGEKLMKLFNMTNFDRDESVMKFARQLRGMGVDEALRARGAKDGDLVRIGKFEFEFVDN

SEQ ID NO: 13643 - protein, 763 aa, Streptococcus pneumoniae
MNALLNGMNDRQAEAVQTTEGPLLIMAGAGSGKTRVLTHRIAYLIDEKLVNPWNILAITFTNKAAREMKERAYSLNPATQDCLIATFHSMCVRILRRDADHIGYNRNFTIVDPGEQRTLMKRILKQLNLDPKKWNERTILGTISNAKNNLIDDVAYAAQAGDMYTQIVAQCYTAYQKELRQSESVDFDDLIMLTLRLFDQNPDVLTYYQQKFQYIHVDEYQDTNHAQYQLVKLLASRFKNICVVGDADQSIYGWRGADMQNILDFEKDYPKAKVVLLEENYRSTKTILQAANEVIKNNKNRRPKNLWTQNADGEQIVYYRADDELDEAVFVARTIDELSRSQNFLHKDFAVLYRTNAQSRTIEEALLKSNIPYTMVGGTKFYSRKEIRDIIAYLNLIANLSDNISFERIINEPKRGIGLGTVEKIRDFANLQNMSMLDASANIMLSGIKGKAAQSIWDFANMMLDLREQLDHLSITELVESVLEKTGYVDILNAQATLESKARVENIEEFLSVTKNFDDTTDVTEEETGLDKLSRFLNDLALIADTDSGSQETSEVTLMTLHAAKGLEFPVVFLIGMEENVFPLSRATEDSDELEEERRLAYVGITRAEKILYLTNANSRLLFGRTNYNRPTRFINEISSDLLEYQGLARPANTSFKASYSSGSISFGQGMSLAQALQDRKRGAAPKSIQSSGLPFGQFTAGAKPASSEANWSIGDIALHKKWGEGTVLEVSGSGARQELKINFPEVGLKKLLASVAPIEKKI

SEQ ID NO: 13644 - protein, 516 aa, Streptococcus pneumoniae
MSNKPIADMIETIEHFAQTQPSYPVYNVLGQEHTYGDLKADSDSLAAVIDQLGLPEKSPVVVFGGQEYEMLATFVALTKSGHAYIPIDSHSALERVSAILEVAEPSLIIAISAFPLEQVSTPMINLAQVQEAFAQGNNYEITHPVKGDDNYYIIFTSGTTGKPKGVQISHDNLLSFTNWMITDKEFATPSRPQMLAQPPYSFDLSVMYWAPTLALGGTLFTLPSVITQDFKQLFAAIFSLPIAIWTSTPSFADMAMLSEYFNSEKMPGITHFYFDGEELTVKTAQKLRERFPNARIINAYGPTEATVALSAVAVTDEMLATLKRLPIGYTKADSPTFIIDEEGNKLPNGEQGEIIVSGPAVSKGYMKNPEKTAEAFFEFEGLPAYHTGDVGTMTDEGLLLYGGRMDFQIKFNGYRIELEDVSQNLNKSRFIESAVAVPRYNKDHKVQNLLAYVILKDGVREQFERDIDITKAIKEDLTDIMMSYMMPSKFLYRDSLPLTPNGKIDIKGLINEVNKR

SEQ ID NO: 13645 - protein, 338 aa, Streptococcus pneumoniae; identical to SEQ ID NO: 13457

SEQ ID NO: 13646 - protein, 1226 aa, Streptococcus pneumoniae
MVDVNRFKSMQITLASPSKVRSWSYGEVKKPETINYRTLKPEREGLFDEVIFGPTKDWECACGKYKRIRYRGIVCDRCGVEVTRTKVRRERMGHIELKAPVSHIWYFKGIPSRMGLTLDMSPRALEEVIYFAAYVVIDPKDTPLEHKSIMTEREYRERLREYGYGSFVAKMGAEAIQDLLKQVDLEKEIAELKEELKTATGQKRVKAIRRLDVLDAFYKSGNKPEWMILNILPVIPPDLRPMLQLDGGRFASSDLNDLYRRVINRNNRLARLLELNAPGIIVQNEKRMLQEAVDALIDNGRRGRPITGPGSRPLKSLSHMLKGKQGRFRQNLLGKRVDFSGRSVIAVGPTLKMYQCGVPREMAIELFKPFVMREIVARDIVQNVKAAKRLVERGDERIWDILEEVIKEHPVLLNRAPTLHRLGIQAFEPVLIDGKALRLHPLVCEAYNADFDGDQMAIHVPLSEEAQAEARILMLAAEHILNPKDGKPVVTPSQDMVLGNYYLTMEEAGREGEGMVFKDRDEAVMAYRNGYVHLHSRVGIATDSLNKPWTEEQRHKVLLTTVGKILFNDIMPEGLPYLQEPNNANLTEGVPAKYFLPLGGAIKEAISNLELNPPFKKKNLGNIIAEIFKRFRTTETSALLDRMKNLGYHHSTLAGLTVGIADIPVVDDKAEIIEESHKRVEQITKQFRRGMITDDERYNAVTAEWRAAREKLEKRLIANQDPKNPIVMMMDSGARGNISNFSQLAGMRGLMAAPNGRIMELPILSNFREGLSVLEMFFSTHGARKGMTDTALKTADSGYLTRRLVDVAQDVIIREDDCGTDRGLLIRSIAEGKEMIESLEERLNGRYTKKTVKHPETGAVIIGPNELITEDKAREIVNAGVEEVTIRSVFTCNTRHGVCRHCYGINLATGDAVEVGEAVGTIAAQSIGEPGTQLTMRTFHTGGVASNTDITQGLPRVQEIFEARNPKGEAVITEVKGQVTAIEEDASTRTKKVFVKGETGEGEYVVPFTARMRVEVGGQVARGAALTEGSIQPKRLLAVRDVLSVETYLLGEVQKVYRSQGVEIGDKHIEVMVRQMIRKVRVMDPGDTDLLMGTLMDINDFTDANKDVLIAGGVPATGRPVLMGITKASLETNSFLSAASFQETTRVLTDAAIRGKKDHLLGLKENVIIGKIIPAGTGMARYRNLEPHAVNEEEYLNPPVEEEGNEETTEVVVDTAVETVEETVEN

SEQ ID NO: 13647 - protein, 316 aa, Streptococcus pneumoniae
MTKEFHHVTVLLHETIDMLDVKPDGIYVDATLGGAGHSEYLLSKLSEKGHLYAFDQDQNAIDNAQKRLAPYIEKGMVTFIKDNFRHLQARLRETGVQEIDGICYDLGVSSPQLDQRERGFSYKKDAPLDMRMNQDASLTAYEVVNNYDYHDLVRIFFKYGEDKFSKQIARKIEQAREVKPIETTTELAEIIKLVKPAKELKKKGHPAKQIFQAIRIEVNDELGAADESIQQAMDMLALDGRISVITFHSLEDRLTKQLFKEASTVEVPKGLPFIPDDLKPKMELVSRKPILPSAEELEANNRSHSAKLRVVRKIHK

SEQ ID NO: 13648 - protein, 837 aa, Streptococcus pneumoniae
MANILKTIIENDKGEIRRLEKMADKVFKYEDQMAALTDDQLKAKTVEFKERYQNGESLDSLLYEAFAVVREGAKRVLGLFPYKVQVMGGIVLHHGDVPEMRTGEGKTLTATMPVYLNALSGKGVHVVTVNEYLSERDATEMGELYSWLGLSVGINLATKSPMEKKEAYECDITYSTNSEIGFDYLRDNMVVRAENMVQRPLNYALVDEVDSILIDEARTPLIVSGANAVETSQLYHMADHYVKSLNKDDYIIDVQSKTIGLSDSGIDRAESYFKLENLYDIENVALTHFIDNALRANYIMLLDIDYVVSEEQEILIVDQFTGRTMEGRRYSDGLHQAIEAKEGVPIQDETKTSASITYQNLFRMYKKLSGMTGTGKTEEEEFREIYNIRVIPIPTNRPVQRIDHSDLLYASIESKFKAVVEDVKARYQKGQPVLVGTVAVETSDYISKKLVAAGVPHEVLNAKNHYREAQIIMNAGQRGAVTIATNMAGRGTDIKLGEGVRELGGLCVIGTERHESRRIDNQLRGRSGRQGDPGESQFYLSLEDDLMKRFGSERLKGIFERLNMSEEAIESRMLTRQVEAAQKRVEGNNYDTRKQVLQYDDVMREQREIIYAQRYDVITADRDLAPEIQSMIKRTIERVVDGHARAKQDEKLEAILNFAKYNLLPEDSITMEDLSGLSDKAIKEELFQRSLKVYDSQVSKLRDEEAVKEFQKVLILRVVDNKWTDHIDALDQLRNAVGLRGYAQNNPVVEYQAEGFRMFNDMIGSIEFDVTRLMMKAQIHEQERPQAERHISTTATRNIAAHQASMPEDLDLSQIGRNELCPCGSGKKFKNCHGKRQ

SEQ ID NO: 13649 - protein, 122 aa, Streptococcus pneumoniae; identical to SEQ ID NO: 13472

SEQ ID NO: 13650 - protein, 374 aa, Streptococcus pneumoniae; identical to SEQ ID NO: 13473

SEQ ID NO: 13651 - protein, 368 aa, Streptococcus pneumoniae
MEEILCIGCGATIQTTDKAGLGFTPQSALEKGLETGEVYCQRCFRLRHYNEITDVQLTDDDFLKLLHEVGDSDALVVNVIDIFDFNGSVIPGLPRFVSGNDVLLVGNKKDILPKSVKSGKISQWLMKRAREEGLRPVDVVLTSAQNKHAIKEVIDKIEHYRKGRDVYVVGVTNVGKSTLINAIIQEITGDQNVITTSRFPGTTLDKIEIPLDDGSYIYDTPGIIHRHQMAHYLTAKNLKYVSPKKEIKPKTYQLNPEQTLFLGGLGRFDFIAGEKQGFTAFFDNELKLHRSKLEGASAFYDKHLGTLLTPPNSKEKEDFPRLVQHVFTIKDKTDLVISGLGWIRVTGTAKVAVWAPEGVAVVTRKAII

SEQ ID NO: 13652 - protein, 364 aa, Streptococcus pneumoniae
MSKELHINTILAQAGIKSDEATGALVTPLHFSTTYQHPEFGRSTGFDYTRTKNPTRSKAEEVLAAIESADYALATSSGMSAIVLAFSVFPVGSKVLAVRDLYGGSFRWFNQVEQEGHFHFTYANTEEELIAELEKDVDVLYIETPTNPLMLEFDIEKLAKLAHAKGAKVVVDNTFYSPIYQRPIEDGADIVLHSATKYLAGHNDVLAGVVVTNSLELYEKLFYNLNTTGAVLSPFDSYQLLRGLKTLSLRMERSTANAQEVVAFLKDSPAVKEVLYTGRGGMISFKVADETRIPHILNSLKVFSFAESLGGVESLITYPTTQTHADIPAEVRHSYGLTDDLLRLSIGIEDARDLIADLRQALEG

SEQ ID NO: 13653 - protein, 359 aa, Streptococcus pneumoniae
MKTEECFMKAYTYVKPGLASFVDVDKPVIRKPTDAIVRIVKTTICGTDLHIIKGDVPTCQSGTILGHEGIGIVEEVGEGVSNFKKGDKVLISCVCACGKCYYCKKGIYAHCEDEGGWIFGHLIDGMQAEYLRVPHADNTLYHTPEDLSDEALVMLSDILPTGYEIGVLKGKVEPGCSVAIIGSGPVGLAALLTAQFYSPAKLIMVDLDDNRLETALSFGATHKVNSSDPEKAIKEIYDLTDGRGVDVAIEAVGIPATFDFCQKIIGVDGTVANCGVHGKPVEFDLDKLWIRNINVTTGLVSTNTTPQLLKALESHKIEPEKLVTHYFKLSEIEKAYEVFSKAADHHAIKVIIENDISEA

SEQ ID NO: 13654 - protein, 317 aa, Streptococcus pneumoniae
MDFEKIEQAYTYLLENVQVIQSDLATNFYDALVEQNSIYLDGETELNQVKDNNQTLKRLALRKEEWLKTYQFLLMKAGQTEPLQANHQFTPDAIALLLVFIVEELFKEEEITILEMGSGMGILGATFLTSLDKKVDYLGMEVDDLLIDLAASMADVIGLQAGFVQGDAVRPQMLKESDVVISDLPVGYYPDDAVASRHQVASSQEHTYAHHLLMEQGFKYLKSDGYAIFLAPSDLLTSPQSDLLKVWLKEEASLVAMISLPENLFANAKQSKTIFILQKKSEIAVEPFVYPLASLQDASVLMKFKENFQKWTQGTEI

SEQ ID NO: 13655 - protein, 286 aa, Streptococcus pneumoniae
MNCEAVALGSFCELKSRRGKKQKGEILMAVISMKQLLEAGVHFGHQTRRWNPKMAKYIFTERNGIHVIDLQQTVKYADQAYDFMRDAAANDAVVLFVGTKKQAADAVAEEAVRSGQYFINHRWLGGTLTNWGTIQKRIARLKEIKRMEEDGTFEVLPKKEVALLNKQRARLEKFLGGIEDMPRIPDVMYVVDPHKEQIAVKEAKKLGIPVVAMVDTNTDPDDIDVIIPANDDAIRAVKLITAKLADAIIEGRQGEDAVAVEAEFAASETQADSIEEIVEVVEGDNA

SEQ ID NO: 13656 - protein, 346 aa, Streptococcus pneumoniae; identical to SEQ ID NO: 13437

SEQ ID NO: 13657 - protein, 306 aa, Streptococcus pneumoniae
MSIYNNITELIGQTPIVKLNNIVPEGAADVYIKLEAFNPGSSVKDRIALSMIEKAEQDGILKPGSTIVEATSGNTGIGLSWVGAAKGYKVVIVMPETMSVERRKIIQAYGAELVLTPGSEGMKGAIAKAQEIAAERDGFLPLQFDNPANPEVHERTTGAEILAAFGKDGLDAFVAGVGTGGTISGVSHALKSENSNIQVFAVEADESAILSGEKPGPHKIQGISAGFIPDTLDTKAYDGIVRVTSDDALALGREIGGKEGFLVGISSAAAIYGAIEVAKKLGTGKKVLALAPDNGERYLSTALYEL

SEQ ID NO: 13658 - protein, 335 aa, Streptococcus pneumoniae
MKRTWRNSFVTNLNTPFMIGNVEIPNRTVLAPMAGVTNSAFRTIAKELGAGLVVMEMVSDKGIQYNNEKTLHMLHIDEGENPVSIQLFGSDEDSLARAAEFIQENTKTDIVDINMGCPVNKIVKNEAGAMWLKDPDKIYSIINKVQSVLDIPLTVKMRTGWADPSLAVENALAAEAAGVSALAMHGRTREQMYTGHADLETLYKVAQALTKIPFIANGDIRTVQEAKQRIEEVGADAVMIGRAAMGNPYLFNQINHYFETGEILPDLTFEDKMKIAYEHLKRLINLKGENVAVREFRGLAPHYLRGTSGAAKLRGAISQASTLAEIEALLQLEKA

SEQ ID NO: 13659 - protein, 290 aa, Streptococcus pneumoniae; identical to SEQ ID NO: 13432

SEQ ID NO: 13660 - protein, 502 aa, Streptococcus pneumoniae
MSQEKYIMAIDQGTTSSRAIIFNKKGEKVSSSQKEFTQIFPQAGWVEHNANEIWNSVQSVIAGAFIESGVKPNQIEAIGITNQRETTVVWDKKTGLPIYNAIVWQSRQTAPLAEQLKNQGYVEKFHEKTGLIIDAYFSATKVRWILDHVEGAQERAEKGELLFGTIDTWLVWKLTDGAAHVTDYSNAARTMLYNIKELKWDDEILEILNIPKAILPEVRSNSEIYGKTAPFHFYGGEVPISGMAGDQQAALFGQLAFEPGMVKNTYGTGSFIIMNTGEEMQLSENNLLTTIGYGINGKVYYALEGSIFIAGSAIQWLRDGLRMVENSPESEKYARDSHNNDEVYVVPAFTGLGAPYWNQNARGSVFGLTRGTSKEDFIKATLQSIAYQVRDIIDTMQVDTQTAIQVLKVDGGAAMNNFLMQFQADILGIDIARAKNLETTALGAAFLAGLSVGYWKDLDELKLLNETGELFEPSMNESRKEQLYKGWKKAVKATQVFAEVDD

SEQ ID NO: 13661 - protein, 752 aa, Streptococcus pneumoniae; identical to SEQ ID NO: 13421

SEQ ID NO: 13662 - protein, 378 aa, Streptococcus pneumoniae
MSKEMLEAFRILEEDKGIKKEDIIDAVVESLRSAYRRRYGQSDSVAIDFNEKTGDFTVYTVREVVDEVFDSRLEISLKDALAINSAYELGDKIKFEEAPAEFGRVAAQSAKQTIMEKMRKQTRAITYNTYKEHEQEIMSGTVERFDNRFIYVNLGSIEAQLSKQDQIPGEVFASHDRIEVYVYKVEDNPRGVNVFVSRSHPEMIKRLMEQEIPEVYDGTVEIMSVAREAGDRTKVAVRSHNPNVDAIGTIVGRGGANIKKITSKFHPARYDAKNDRMVPIEENIDVIEWVADPAEFIYNAIAPAEVDQVIFDENDSKRALVVVPDNKLSLAIGRRGQNVRLAAHLTGYRIDIKSASEFEAMEDAASVELEVENDTVEE

SEQ ID NO: 13663 - protein, 900 aa, Streptococcus pneumoniae
MKSHSSSVEEAVAAKIAASFKPAAAPKVEAKPAAPKVSAEKKAEKSEPAKPAVAKEEAKPAEPVAPKTEKVAVKPQSRNFKAEREARAKEQAERRKQNKGNNRDQQQNGNRQKNDGRNGGKQGQSNRDNRRFNDQAKKQQGQQKRRNERRQQEDKRSNQAAPRIDFKARAAALKAEQNAEYARSSEERFKQYQAAKEALAQANKRKEPEEIFEEAAKLAEQAQQVQAVVEVVPEKKEPAVDTRRKKQARPDKNRDDYDHEEDGPRKQQKNRSSQNQVRNQKNSNWNNNKKNKKGNNKNNRNQTPKPVTERKFHELPTEFEYTDGMTVAEIAKRIKREPAEIVKKLFMMGVMATQNQSLDGETIELLMVDYGIEAKQKVEVDNADIERFFVEDGYLNEDELVERPPVVTIMGHVDHGKTTLLDTLRNSRVATGEAGGITQHIGAYQIVENGKKITFLDTPGHAAFTSMRARGASVTDITILVVAADDGVMPQTIEAINHSKAANVPIIVAINKIDKPGANPERVIGELAEHGVMSTAWGGDSEFVEISAKFNQNIEELLETVLLVAEIQELKADPTVRAIGTVIEARLDKGKGAVATLLVQQGTLNVQDPIVVGNTFGRVRAMTNDLGRRVKVAGPSTPVSITGLNEAPMAGDHFAVYEDEKSARAAGEERAKRALMKQRQATQRVSLENLFDTLKAGELKSVNVIIKADVQGSVEALSASLQKIDVEGVKVTIVHSAVGAINESDVTLAEASNAFIVGFNVRPTPQARQQAEADDVEIRLHSIIYKVIEEMEEAMKGMLDSEFEEKVIGEAVIRETFKVSKVGTIGGFMVINGKVARDSKVRVIRDGVVIYDGELASLKHYKDDVKEVTNGREGGLMIDGYNDIKMDDVIEAYVMEEIKR

SEQ ID NO: 13664 - protein, 223 aa, Streptococcus pneumoniae
MNVKENTELVFREVAEASLSAHRESGSVSVIAVTKYVDVPTAEALLPLGVHHIGENRVDKFLEKYEALKDRDVTWHLIGTLQRRKVKDVIQYVDYFHALDSVKLAGEIQKRSDRVIKCFLQVNISKEESKHGFSREELLEILPELARLDKIEYVGLMTMAPFEASSEQLKEIFKAAQDLQREIQEKQIPNMPMTELSMGMSRDYKEAIQFGSTFVRIGTSFFK

SEQ ID NO: 13665 - protein, 266 aa, Streptococcus pneumoniae; identical to SEQ ID NO: 13480

SEQ ID NO: 13666 - protein, 411 aa, Streptococcus pneumoniae
MDFSRKDNQSMEYRKIQEALEALQKGRLVLVIDDKDRENEGDLICSAQAATTENVNFMATYAKGLICMPMSESLANQLMLSPMVENNTDNHKTAFTVSIDYKETTTGISAEERGLTARMCVAEDITPSDFRRPGHMFPLIAKKGGVLERNGHTEATVDLLKLAGLKECGLCCEIMNHDGKMMRTDDLIQFSKKHNIPLITIKELQEYRKVYDQLVERVSTVNMPTRYGNFKAISYIDKLNGEHHLALIMGNIEDEANVLCRVHSECLTGDVLGSLRCDCGQQFDKAMKMIVENGSGVLLYLRQEGRGIGLINKLKAYHLQDQGMDTLDANLALGFEGDLREYHIGAQMLKDLGLQSLHLLTNNPDKVEQLEKYGITISSRISIEIEANPYDSFYLETKKNRMGHILNMEEK

SEQ ID NO: 13667 - protein, 650 aa, Streptococcus pneumoniae
MSHIIELPEMLANQIAAGEVIERPASVVKELVENAIDAGSSQIIIEIEEAGLKKVQITDNGHGIAHDEVELALRRHATSKIKNQADLFRIRTLGFRGEALPSIASVSVLTLLTAVDGASHGTKLVARGGEVEEVIPATSPVGTKVCVEDLFFNTPARLKYMKSQQAELSHIIDIVNRLGLAHPEISFSLISDGKEMTRTAGTGQLRQAIAGIYGLVSAKKMIEIENSDLDFEISGFVSLPELTRANRNYISLFINGRYIKNFLLNRAILDGFGSKLMVGRFPLAVIHIHIDPYLADVNVHPTKQEVRISKEKELMTLVSEAIANSLKEQTLIPDALENLAKSTVRNREKVEQTILPLKENTLYYEKTEPSRPSQTEVADYQVELTDEGQDLTLFAKETLDRLTKPAKLHFAERKPANYDQLDHPELDLASIDKAYDKLEREEASSFPELEFFGQMHGTYLFAQGRDGLYIIDQHAAQERVKYEEYRESIGNVDQSQQQLLVPYIFEFPADDALRLKERMPLLEEVGVFLAEYGENQFILREHPIWMAEEEIESGIYEMCDMLLLTKEVSIKKYRAELAIMMSCKRSIKANHRIDDHSARQLLYQLSQCDNPYNCPHGRPVLVHFTKSDMEKMFRRIQENHTSLRELGKYN

SEQ ID NO: 13668 - protein, 1460 aa, Streptococcus pneumoniae
MSNSFEILMNQLGMPAEMRQAPALAQADIERVVVHKISKVWEFHFVFSNILPIEIFLELKKGLREEFSKTGNKAIFEIKVLSQEFSNQLLQAYYREVFSEGPCASQGFKSLYQNLQVRAEDNQLFIEGSEAIDKEHFKKNHLPNLAKQLEKFGFPAFNCQVEKNDVLTQEQEEAFYAENEQIVQAANEEALRAMEQLEQMAPPPAEEKPAFDFQAKKAEAKPKLDKAEITPMIEVTTEENRLVFEGVVFDVEQKVTRTGRVLINFKMTDYTSSFSMQKWVKNEEEAQKFDLIKKNSWLRVRGNVEMNNFTRDLTMNVQDVQEVVHYERKDLMPEGERRVEFHAHTNMSTMDALPEVEEIVATAAKWGHKAVAITDHGNVQSFPHGYKAAKKAGIQLIYGMEANIVEDRVPIVYNEVEMDLLEATYVVFDVETTGLSAIYNDLIQVAASKMYKGNVIAEFDEFINPGHPLSAFTTELTGITDDHVKNAKPLEQVLQEFQEFCKDTVLVAHNATFDVGFMNANYERHGLPKISQPVIDTLEFARNLYPEYKRHGLGPLTKRFGVALEHHHMANYDAEATGRLLFIFIKEVAEKHGVTDLARLNIDLISPDSYKKARIKHATIYVKNQVGLKNIFKLVSLSNTKYFEGVPRIPRTVLDAHREGLILGSACSEGEVFDAVVSQGVDAAVEVAKYYDFIEVMPPAIYAPLIAKEQVKDMEELQTIIKSLIEVGDRLGKPVLATGNVHYIEPEEEIYREIIVRSLGQGAMINRTIGHGEHAQPAPLPKAHFRTTNEMLDEFAFLGEELARKLVIENTNALADIFEPVEVVKGDLYTPFIDKAEETVAELTYKKAFEIYGNPLPDIVDLRIEKELTSILGNGFAVIYLASQMLVQRSNERGYLVGSRGSVGSSFVATMIGITEVNPLSPHYVCGQCQYSEFITDGSYGSGFDMPNKDCPNCGHKLSKNGQDIPFETFLGFDGDKVPDIDLNFSGEDQPSAHLDVRDIFGEEYAFRAGTVGTVAAKTAYGFVKGYERDYGKFYRDAEVERLAQGAAGVKRTTGQHPGGIVVIPNYMDVYDFTPVQYPADDVTAEWQTTHFNFHDIDENVLKLDVLGHDDPTMIRKLQDLSGIDPNEIPMDDEGVMALFSGTDVLGVTPEQIGTPTGMLGIPEFGTNFVRGMVDETHPTTFAELLQLSGLSHGTDVWLGNAQDLIKQGIADLSTVIGCRDDIMVYLMHAGLEPKMAFTIMERVRKGLWLKISEEERNGYIEAMKANKVPEWYIESCGKIKYMFPKAHAAAYVMMALRVAYFKVHHPIYYYCAYFSIRAKAFDIKTMGAGLDAIKRRMEEISEKRKNNEASNVEIDLYTTLEIVNEMWERGFKFGKLDLYRSDATEFIIDGDTLIPPFVAMDGLGENVAKQLVRAREEGEFLSKTELRKRGGLSSTLVEKMDEMGILGNMPEDNQLSLFN

SEQ ID NO: 13669 - protein, 317 aa, Streptococcus pneumoniae
MDREPVTVRSYANIAIIKYWGKKKEKEMVPATSSISLTLENMYTETTLSPLPANVTADEFYINGQLQNEVEHAKMSKIIDRYRPAGEGFVRIDTQNNMPTAAGLSSSSSGLSALVKACNAYFKLGLDRSQLAQEAKFASGSSSRSFYGPLGAWDKDSGEIYPVETDLKLAMIMLVLEDKKKPISSRDGMKLCVETSTTFDDWVRQSEKDYQDMLIYLKENDFAKIGELTEKNALAMHATTKTASPAFSYLTDASYEAMDFVRQLREKGEACYFTMDAGPNVKVFCQEKDLEHLSEIFGHRYRLIVSKTKDLSQDDCC

SEQ ID NO: 13670 - protein, 335 aa, Streptococcus pneumoniae
MIAVKTCGKLYWAGEYAILEPGQLALIKDIPIYMRAEIAFSDSYRIYSDMFDFAVDLRPNPDYSLIQETIALMGDFLAVRGQNLRPFSLEICGKMEREGKKFGLGSSGSVVVLVVKALLALYDVSVDQELLFKLTSAVLLKRGDNGSMGDLACIVAEDLVLYQSFDRQKVAAWLEEENLATVLERDWGFSISQVKPTLECDFLVGWTKEVAVSSHMVQQIKQNINQNFLSSSKETVVSLVEALEQGKSEKIIEQVEVASKLLEGLSTDIYTPLLRQLKEASQDLQAVAKSSGAGGGDCGIALSFDAQSTKTLKNRWADLGIELLYQERIGHDDKS

SEQ ID NO: 13671 - protein, 336 aa, Streptococcus pneumoniae
MTTNRKDEHILYALEQKSSYNSFDEVELIHSSLPLYNLDEIDLSTEFAGRKWDFPFYINAMTGGSNKGREINQKLAQVAESCGILFVTGSYSAALKNPTDDSFSVKSSHPNLLLGTNIGLDKPVELGLQTVEEMNPVLLQVHVNVMQELLMPEGERKFRSWQSHLADYSKQIPVPIVLKEVGFGMDAKTIERAYEFGVRTVDLSGRGGTSFAYIENRRSGQRDYLNQWGQSTMQALLNAQEWKDKVELLVSGGVRNPLDMIKCLVFGAKAVGLSRTVLELVETYTVEEVIGIVQGWKADLRLIMCSLNCATIADLQKVDYLLYGKLKEAKDQMKKA

SEQ ID NO: 13672 - protein, 156 aa, Streptococcus pneumoniae
MPYKRQRSFSMALSKLDSLYMAVVADHSKNPHHQGKLEDAEQISLNNPTCGDVINLSVKFDAEDRLEDIAFLNSGCTISTASASMMTDAVLGKTKQEILELATIFSEMVQGQKDERQDQLGDAAFLSGVAKFPQRIKCATLAWNALKKTIENQEKQ

SEQ ID NO: 13673 - protein, 652 aa, Streptococcus pneumoniae
MNKRMNELVALLNRYATEYYTSDNPSVADSEYDRLYRELVELETAYPEQVLADSPTHRVGGKVLDGFEKYSHQYPLYSLQDAFSREELDAFDARVRKEVAHPTYICELKIDGLSISLTYEKGILVAGVTRGDGSIGENITENLKRVKDIPLTLPEELDITVRGECYMPRASFDQVNQVRQENGEPEFANPRNAAAGTLRQLDTAVVAKRNLATFLYQEASPSTRDSQEKGLKYLEQLGFVVNPKRILAENIDEIWNFIQEVGQERENLPYDIDGVVIKVNDLASQEELGFTVKAPKWAVAYKFPAEEKEAQLLSVDWTVGRTGVVTPTANLTPVQLAGTTVSRATLHNVDYIAEKDIRKDDTVIVYKAGDIIPAVLRVVESKRVSEEKLDIPTNCPSCNSDLLHFEDEVALRCINPRCPAQIMEGLIHFASRDAMNITGLGPSIVEKLFAANLVKDVADIYRLQEEDFLLLEGVKEKSAAKLYQAIQASKENSAEKLLFGLGIRHVGSKVSQLLLQYFHSIENLSQADSEEVASIESLGGVIAKSLQTYFATEGSEILLRELKETGVNLDYKGQTVVADAALSGLTVVLTGKLERLKRSEAKSKLESLGAKVTGSISKKTDLVVVGADAGSKLQKAQELGIQVRDEAWLESL

SEQ ID NO: 13674 - protein, 77 aa, Streptococcus pneumoniae
MTEKEIFDRIVTIIQERQGEDFVVTESLSLKDDLDADSVDLMEFILTLEDEFSIEISDEEIDQLQSVGDVVKIIQGK

SEQ ID NO: 13675 - protein, 401 aa, Streptococcus pneumoniae
MSQSYINVIGAGLAGSEAAYQIAERGIPVKLYEMRGVKSTPQHKTDNFAELVCSNSLRGDALTNAVGLLKEEMRRLGSVILESAEATRVPAGGALAVDRDGFSQMVTEKVVNHPLIEVVRDEITELPTDVITVVATGPLTSDALAEKIHALNNGDGFYFYDAAAPIIDVNTIDMSKVYLKSRYDKGEAAYLNAPMTKQEFMDFHEALVNAEEAPLNSFEKEKYFEGCMPIEVMAKRGIKTMLYGPMKPVGLEYPDDYTGPRDGEFKTPYAVVQLRQDNAAGSLYNIVGFQTHLKWGEQKRVFQMIPGLENAEFVRYGVMHRNSYMDSPNLLEQTYRSKKQPNLFFAGQMTGVEGYVESAASGLVAGINAARLFKEESEVIFPETTAIGSLAHYITHADSKN

SEQ ID NO: 13676 - protein, 212 aa, Streptococcus pneumoniae
MSKGFLVSLEGPEGAGKTSVLEALLPILKEKGVEVLTTREPGGVLIGEKIREVILDPSHTQMDAKTELLLYIASRRQHLVEKVLPALEAGKLVIMDRFIDSSVAYQGFGRGLDIEAIDWLNQFATDGLKPDLTLYFDIEVEEGLARIAANSDREVNRLDLEGLDLHKKVRQGYLSLLDKEGNRIVKIDASLPLEQVVETTKAVLFDGMGLAK

SEQ ID NO: 13677 - protein, 296 aa, Streptococcus pneumoniae
MKQDQLKAWQPAQFDRFVRILEQDQLNHAYLFSGFFGSLEMAQFLAKSLFCTDKVGVLPCEKCRSCKLIEQEEFPDVTLIKPVNQVIKTERIRELVGQFSQAGIESQQQVFIIEQADKMHPNAANSLLKVIEEPQSEVYIFFLTSDEEKMLPTIRSRTQIFHFKKQEEKLILLLEQMGLVKKKATLLAKFSQSRAEAEKLANQASFWTLVDESERLLTWLVAKKKESYLQVAKLANLADDKEKQDQVLRILEVLCGQDLLQVRVRVILQDLLEARKMWQANVSFQNAMEYLVLKEI

SEQ ID NO: 13678 - protein, 289 aa, Streptococcus pneumoniae
MQIQKSFKGQSPYGKLYLVATPIGNLDDMTFRAIQTLKEVDWIAAEDTRNTGLLLKHFDISTKQISFHEHNAKEKIPDLIGFLKAGQSIAQVSDAGLPSISDPGHDLVKAAIEEEIAVVTVPGASAGISALIASGLAPQPHIFYGFLPRKSGQQKQFFDSKKDYPETQIFYESPHRVADTLENMLEVYGDRSVVLVRELTKIYEEYQRGTISELLESIAETSLKGECLLIVEGASQDVEEKGEEDLFLEIQARIQQGMKKNQAIKEVAKIYQWNKSQLYAAYHDWEEKQ

SEQ ID NO: 13679 - protein, 272 aa, Streptococcus pneumoniae
MTNTSFSIEQFSLKGKIALITGASYGIGFAIAKSYAEAGATIVFNDINQDLVNKGIEAYREVGIEAHGYVCDVTDEDGIQAMVKQIEQEVGVIDILVNNAGIIRRVPMCEMSAADFRKVIDIDLNAPFIVSKAVIPSMIKKGHGKIINICSMMSELGRETVSAYAAAKGGLKMLTRNIASEYGGANIQCNGIGPGYIATPQTAPLRELQEDGSRHPFDQFIIAKTPAARWGNPEDLMGPAVFLASDASNFVNGHILYVDGGILAYIGKQPEN

SEQ ID NO: 13680 - protein, 130 aa, Streptococcus pneumoniae
MSQAQYAGTGRRKNAVARVRLVPGTGKITVNKKDVEEYIPHADLRLVINQPFAVTSTVGSYDVFVNVIGGGYAGQSGAIRHGIARALLQVDPDFRDSLKRAGLLTRDSRKVERKKPGLKKARKASQFSKR

SEQ ID NO: 13681 - protein, 267 aa, Streptococcus pneumoniae
MKRKDFNMTSLKLLKEKAPLVICITNDVVKNFTANGLVALGASPAMSEFPADLEDLLKYAGGLLINIGTLTDENWKLYQAALKIAEKYNVPVVLDPVACGAGEYRKKVADDLINNYKLAAIRGNAGEIASLVGIDVASKGVDSAGVDNIDEIALAANEKFNIPIVVTGEVDAIAVNGEVVTIHNGSAMMPKVIGTGCLLGAVVASFIGLEKGQELKSLETAMLVYNIAGEMAEKRPNGHLPGTFKVEFINALYEITDEDVKEFKRVK

SEQ ID NO: 13682 - protein, 607 aa, Streptococcus pneumoniae
MSKIIGIDLGTTNSAVAVLEGTESKIIANPEGNRTTPSVVSFKNGEIIVGDAAKRQAVTNPDTVISIKSKMGTSEKVSANGKEYTPQEISAMILQYLKGYAEDYLGEKVTKAVITVPAYFNDAQRQATKDAGKIAGLEVERIVNEPTAAALAYGLDKTDKEEKILVFDLGGGTFDVSILELGDGVFDVLSTAGDNKLGGDDFDQKIIDHLVAEFKKENGIDLSTDKMAMQRLKDAAEKAKKDLSGVTSTQISLPFITAGEAGPLHLEMTLTRAKFDDLTRDLVERTKVPVRQALSDAGLSLSEIDEVILVGGSTRIPAVVEAVKAETGKEPNKSVNPDEVVAMGAAIQGGVITGDVKDVVLLDVTPLSLGIETMGGVFTKLIDRNTTIPTSKSQVFSTAADNQPAVDIHVLQGERPMAADNKTLGRFQLTDIPAAPRGIPQIEVTFDIDKNGIVSVKAKDLGTQKEQTIVIQSNSGLTDEEIDRMMKDAEANAEADKKRKEEVDLRNEVDQAIFATEKTIKETEGKGFDAERDAAQAALDDLKKAQEDNNLDDMKTKLEALNEKAQGLAVKLYEQAAAAQQAQEGAEGAQATGNAGDDVVDGEFTEK

SEQ ID NO: 13683 - protein, 609 aa, Streptococcus pneumoniae
MVITKHFAIHGKNYRSKLVKYILNPSKTKNLALVSDFGMRNYLDFPSYKELVKMYNDNFLSNDGLYEFRHDRQEVNQRRIYSHHIIQSFSPDDHLTPEQINRIGYETVKELTGGRFRFIVATHVDKGHIHNHIILNSIDQNSDKKFLWNYKSERNLRMVSDRLSKIAGAKIIENRYSHRQYEVYRKTNYKYEIKQRVYFLIENSKNFEDFRKKAKALHLIIDFRHKHVTFFMTDSNMKQVVRDDKLNRKQPYNETYFKQKFVQREIINILEFLLPKMKNMNELIQQAEFFDLKIIPKEKHVLFEFNGIKLSEQELGKMNQYSVSYFQDYFNNKNETFVLDNNNLIELYNKEKLIKEKELPTEEVVWKSYQDFKRNRDAVHELEVELNLNQIEAVVDDGIYIKVQFGIRQEGLIFVPNIQINMEEEKVKVFLRETSSYYVYHKDSADKNRFMKGKTLIRQFTLQHEPQHMYRRIPLSKIKEKIEQLDFLISAENSPNDFEDITNDFIAQISYLENMIEQVQNKIDDLTNLEEVLLNNTTNSSSNLENSIQGKSSVDTIEKDLYIYKGKIETLKEQHGEAINLFEMFNKTIKKYKKKQNMKSIEENEIHLE

SEQ ID NO: 13684 - protein, 883 aa, Streptococcus pneumoniae
MSKELSSKYNPAEVEAGRYQKWLDADVFKPSGDQKAKPYSIVIPPPNVTGKLHLGHAWDTTLQDIIIRQKRMQGFDTLWLPGMDHAGIATQAKVEERLRGEGITRYDLGRESFLTKVWEWKDEYATTIKEQWGKMGLSVDYSRERFTLDEGLSKAVRKVFVDLYKKGWIYRGEFIINWDPAARTALSDIEVIHKDVEGAFYHMNYMLEDGSRALEVATTRPETMFGDVAVAVNPEDPRYKDLIGKNVILPIANKLIPIVGDEHADPEFGTGVVKITPAHDPNDFLVGQRHNLPQVNVMNDDGTMNELAFEFSGMDRFEARKAVVAKLEEIGALVKIEKRVHSVGHSERTGVVVEPRLSTQWFVKMDQLAKNAIANQDTEDKVEFYPPRFNDTFLQWMENVHDWVISRQLWWGHQIPAWYNADGEMYVGEEAPEGDGWTQDEDVLDTWFSSALWPFSTMGWPEVDSEDFKRYFPTSTLVTGYDIIFFWVSRMIFQSLEFTGRQPFQNVLIHGLIRDEQGRKMSKSLGNGIDPMDVIEKYGADALRWFLSNGSAPGQDVRFSYEKMDASWNFINKIWNISRYIFMNNGGLTLDVAHDNVTKVATGEAGNVTDRWILHNLNETIAKVTENFDKFEFGVAGHILYNFIWEEFANWYVELTKEVLYSDNEEEKVITRSVLLYTLDKILRLLHPIMPFVTEEIFGQISEGSIVTAAYPTVNLAFEDLAAHTGVESLKDLIRAVRNARAEVNVAPSKPITILVKTSDSDLEAFFNSNVNYIKRFTNPEHLEIASTIPAPELAMSSVITGAEIFLPLADLLNVEEELARLDKELAKWQKELDMVGKKLSNERFVANAKPEVVQKEKDKQADYQAKYDVTVARIDEMKKLVK

SEQ ID NO: 13685 - protein, 455 aa, Streptococcus pneumoniae
MNEKILRSSLAIIQSFLVILLTYLLSAVRETEIVSTTAIALYILHYFVFYISDYGQDFFKRRYLIELVQTLKYILFFALAIGISNFFLEDRFSISRRGMIYFLTLHALLVYVLNLFIKWYWKRAYPNFKGSKKILLLTATSRVEKVLDRLIESNEVVGKLVAVSVLDKPDFQHDCLKVVAEGEIVNFATHEVVDEVFINLPGEKYNIGELVSQFETMGIDVIVNLNAFDRSLARNKQIREMAGLNVVTFSTTFYKTSHVIAKRIIDIVGALVGLILCGLVSIVLVPLIRKDGGSAIFAQTRIGKNGRQFTFYKFRSMCVDAEAKKRELMEQNTMQGGMFKVDDDPRITKIGCFIRKTSLDELPQFYNVLKGDMSLVGTRPPTVDEYEHYTPEQKRRLSFKPGITGLWQVSGRSEIKNFDEVVKLDVAYIDGWTIWKDIEILLKTVKVVFMRDGAK

SEQ ID NO: 13686 - protein, 637 aa, Streptococcus pneumoniae
MTYHFTEEYDIIVIGAGHAGVEASLAASRMGCKVLLATINIEMLAFMPCNPSIGGSAKGIVVREVDALGGEMAKTIDKTYIQMKMLNTGKGPAVRALRAQADKELYSKEMRKTVENQENLTLRQTMIDEILVEDGKVVGVRTATHQEYAAKAVIVTTGTALRGEIIIGDLKYSSGPNHSLASINLADNLKELGLEIGRFKTGTPPRVKASSINYDVTEIQPGDEAPNHFSYTSRDEDYVKDQVPCWLTYTNGTSHEIIQNNLHRAPMFTGVVKGVGPRYCPSIEDKIVRFADKERHQLFLEPEGRNTEEVYVQGLSTSLPEDVQRDLVHSIKGLENAEMMRTGYAIEYDMILPHQLRATLETKKISGLFTAGQTNGTSGYEEAAGQGIIAGINAALKIQDKPELILKRSDGYIGVMIDDLVTKGTIEPYRLLTSRAEYRLILRHDNADMRLTEMGREIGLVDDERWARFEIKKNQFDNEMKRLDSIKLKPVKETNAKVEEMGFKPLTDAVTAKEFLRRPEVSYQDVVAFIGPAAEDLDDKIIELIETEIKYEGYISKAMDQVAKMKRMEEKRIPANIDWDDIDSIATEARQKFKLINPETIGQASRISGVNPADISILMVYLEGKNRSISKTLQKSK

SEQ ID NO: 13687 - protein, 204 aa, Streptococcus pneumoniae; identical to SEQ ID NO: 13428

SEQ ID NO: 13688 - protein, 378 aa, Streptococcus pneumoniae
MKHSVHFGAGNIGRGFIGEILFKNGFHIDFVDVNNQIIHALNEKGKYEIEIAQKGQSRIEVTNVAGINSKEHPEQVIEAIQKTDIITTAIGPNILPFIAELLAKGIEARRVAGNTQALDVMACENMIGGSQFLYQEVKKYLSPEGLTFADNYIGFPNAAVDRIVPTQSHEDSLFVMVEPFNEWVVETKRLKNPDLRLEDVHYEEDLEPFIERKLFSVNSGHATSAYIGAHYGAKTILEALQNPNIKSRIESVLAEIRSLLIAKWNFDKKELENYHKVIIERFENPFIVDEVSRVARTPIRKLGYNERFIRPIRELKELSLSYKNLLKTVGYAFDYRDVNDEESIRLGELLAKQSVKDVVIQVTGLDDQELIERIVEYI

SEQ ID NO: 13689 - protein, 793 aa, Streptococcus pneumoniae
MQRNFMEVYFSGTIERIIFENPSNFYRILLLEIDDTDAEDFDDFEIIVTGTMADVIEGEDYTFWGQIVQHSKYGEQLQISRYDRAKPTSKGLVKYFSSSHFKGIGLKTAQKIVDTYGENTIDEILQHPEKLEGIAGLSAKNREAFVSTLRLNYGTEMVLSKLANYGIPNKLAFQIQDFYKEETLDVVENYPYQLVEDIKGLGFTIADQLAEELGIESQAPERFRAGLVHSLFQACMETGDTYVEARDLLEQTLTLLESSRPVELDPSQVAQELSYLIEEDKVQQIDTKIFDNSLFFAEEGIRSHLVRILEKGEQKSHHLETIQKHITTIEQELGIEYDNIQKQAICDAIQNKVFILTGGPGTGKTTVINGIIAVYALLEGLDLRKKSNLPILLAAPTGRAARRMNELTGLPSATIHRHLGMTGDDDTSHLEDYLDADFIIVDEFSMVDTWLSNQLFSNISSNSKILIVGDSDQLPSVSPGQVLADLLHIPLIPQTRLEKIYRQSKESTIVTLASQIRQGILPADFTQKKADRSYFEIASGHIPATIEKILGAALRNGIPARDIQVLAPMYRGTAGIDAINQLMQDLLNPPQKDQLSFEAPQCHYRKGDKVIHLVNDAEINVFNGDLGAITDLIPGKYTESKQDEIVIDFDGNEVSYPRNEWYKIRLAYAMSIHKSQGSEFPVVILPITSASRRMLERNLIYTAITRAKSKLILLGELQAFDHAIQHIGTARKTYLIERFSDLLENVEEKQQAVSETVTSSASEQSYILTEENWNRIPAMIGITDTDLKEIFGK

SEQ ID NO: 13690 - protein, 271 aa, Streptococcus pneumoniae; identical to SEQ ID NO: 13350

SEQ ID NO: 13691 - protein, 295 aa, Streptococcus pneumoniae
MEIKIETGGLRLDKALSDLSELSRSLANEQIKSGQVLVNGQVKKAKYTVQEGDVVTYHVPEPEVLEYVAEDLPLEIVYQDEDVAVVNKPQGMVVHPSAGHTSGTLVNALMYHIKDLSGINGVLRPGIVHRIDKDTSGLLMIAKNDDAHLVLAQELKDKKSLRKYWAIVHGNLPNDRGVIEAPIGRSEKDRKKQAVTAKGKPAVTRFHVLERFGDYSLVELQLETGRTHQIRVHMAYIGHSVAGDEVYGPRKTLKGHGQFLHAKTLGFTHPRTGKTLEFKADIPEIFKETLERLRK

SEQ ID NO: 13692 - protein, 374 aa, Streptococcus pneumoniae; identical to SEQ ID NO: 13447

SEQ ID NO: 13693 - protein, 1169 aa, Streptococcus pneumoniae
MVTLLDLFSENDQIKKWHQNLTDKKRQLILGLSTSTKALAIASSLEKEDRIVLLTSTYGEAEGLVSDLISILGEELVYPFLVDDAPMVEFLMSSQEKIISRVEALRFLTDSSKKGILVCNIVASRLILPSPNAFKDSIVKISVGEEYDQHAFIHQLKENGYRKVTQVQTQGEFSLRGDILDIFEISQLEPCRIEFFGDEIDGIRSFEVETQLSKENKTELTIFPASDMLLREKDYQRGQSALEKQISKTLSPILKSYLEEILSSFHQKQSHADSRKFLSLCYDKTWTVFDYIEKDTPIFFDDYQKLMNQYEVFERDLAQYFTEELQNSKAFSDMQYFSDIEQIYKKQSPVTFFSNLQKGLGNLKFDKIYQFNQYPMQEFFNQFSFLKEEIERYKKMDYTIILQSSNSMGSKTLEDMLEEYQIKLDSRDKTNICKESVNLIEGNLRHGFHFVDEKILLITEHEIFQKKLKRRFRRQHVSNAERLKDYNELEKGDYVVHHIHGIGQYLGIETIEIKGIHRDYVSVQYQNGDQISIPVEQIHLLSKYISSDGKAPKLNKLNDGHFKKAKQKVKNQVEDIADDLIKLYSERSQLKGFAFSADDDDQDAFDDAFPYVETDDQLRSIEEIKRDMQASQPMDRLLVGDVGFGKTEVAMRAAFKAVNDHKQVVILVPTTVLAQQHYTNFKERFQNFAVNIDVLSRFRSKKEQTATLEKLKNGQVDILIGTHRVLSKDVVFADLGLMIIDEEQRFGVKHKETLKELKKQVDVLTLTATPIPRTLHMSMLGIRDLSVIETPPTNRYPVQTYVLEKNDSVIRDAVLREMERGGQVYYLYNKVDTIVQKVSELQELIPEASIGYVHGRMSEVQLENTLLDFIEGQYDILVTTTIIETGVDIPNANTLFIENADHMGLSTLYQLRGRVGRSNRIAYAYLMYRPEKSISEVSEKRLEAIKGFTELGSGFKIAMRDLSIRGAGNLLGKSQSGFIDSVGFELYSQLLEEAIAKRNGNANANTRTKGNAELILQIDAYLPDTYISDQRHKIEIYKKIRQIDNRVNYEELQEELIDRFGEYPDVVAYLLEIGLVKSYLDKVFVQRVERKDNKITIQFEKVTQRLFLAQDYFKALSVTNLKAGIAENKGLMELVFDVQNKKDYEILEGLLIFGESLLEIKEFKEENSI

SEQ ID NO: 13694 - protein, 88 aa, Streptococcus pneumoniae; identical to SEQ ID NO: 13449

SEQ ID NO: 13695 - protein, 652 aa, Streptococcus pneumoniae
MKKQNNGLIKNPFLWLLFIFFLVTGFQYFYSGNNSGGSQQINYTELVQEITDGNVKELTYQPNGSVIEVSGVYKNPKTSKEGTGIQFFTPSVTKVEKFTSTILPADTTVSELQKLATDHKAEVTVKHESSSGIWINLLVSIVPFGILFFFLFSMMGNMGGGNGRNPMSFGRSKAKAANKEDIKVRFSDVAGAEEEKQELVEVVEFLKDPKRFTKLGARIPAGVLLEGPPGTGKTLLAKAVAGEAGVPFFSISGSDFVEMFVGVGASRVRSLFEDAKKAAPAIIFIDEIDAVGRQRGVGLGGGNDEREQTLNQLLIEMDGFEGNEGIIVIAATNRSDVLDPALLRPGRFDRKVLVGRPDVKGREAILKVHAKNKPLAEDVDLKLVAQQTPGFVGADLENVLNEAALVAARRNKSIIDASDIDEAEDRVIAGPSKKDKTVSQKERELVAHHEAGHTIVGLVLSNARVVHKVTIVPRGRAGGYMIALPKEDQMLLSKEDMKEQLAGLMGGRVAEEIIFNVQTTGASNDFEQATQMARAMVTEYGMSEKLGPVQYEGNHAMLGAQSPQKSISEQTAYEIDEEVRSLLNEARNKAAEIIQSNRETHKLIAEALLKYETLDSTQIKALYETGKMPEAVEEESHALSYDEVKSKMNDEK

SEQ ID NO: 13696 - protein, 526 aa, Streptococcus pneumoniae
MYYFIPAWYGSERTWHADITPWYFSHFRLEFDDTFHQIRLFQEQDIDSRLLVLAYQPHLRYFLYRHGVLETDTYSVFDVMQDFHNLHTQVLSIRDIEWDDDCEFIYSPFTIIVQKNGKKFAKVEHGVEGFISDIQYFEPNGQIHMHHIMDDRGFVSSIIFFEDGQAAYQEYLNPKGVWQFRERLKEGGQVEVNPILGYRFKMLTYQNMGDLVAEFFENYLQTYVKDQDIFMLPSHSHHDQLVLDRLPSTNPKLLSLFIGRNPQDTFRDLDVTFEKSDLILVDREDSLRLLQELYPERMHQCYHLSSFDTRLRLGRSQTKKESIIYFQLDFEQGIDNQALLQVLSFVAENKDTEVIFGAFAASQEQMNEVEGIVESFIQENIQSENLGKAIDYGDAENPLEENQHQDLRLQFVNLNDELDLIKTLEFVRLIVDLNRHPHLYTQIAGISAGIPQINLVETVYVEHLKNGYLLADVTEFSKAAHYYTDRLKEWNESLIYSIDKIKEHTGQQFLGKLEKWIEEVKNVKGT

SEQ ID NO: 13697 - protein, 511 aa, Streptococcus pneumoniae
MSKELNILQIGLANWENHYDIPENMSWYHFYPNSSKALREIIEKEDINRFHAVLIEDGQYSRDLFSYVKYFEPYTLFYNQNLQINDREVVDFLKKRCAQAIDFLSPQQLINDLSKSLFGGGYGDKLFPPTIQVNPNFTGAISYQGLDYVSLEGEFGQDFAQLAYWAYNIMVQKTLPIELWLEYEKEGNCDFRLVIRKMWSGSVDDFFEEVIVSEKDLEQALFMDSRDGDYFLSISVEARGRGTIKLGNLHQRWSRKQFGKFVLGGNILHDSKRDEINYFFHPGDFKPPLTVYFAGYRPAEGFEGYFMMKTLGCPFILFSDPRLEGGAFYLGTDELEGKVKDMITHYLDYLGFDHKDLILSGLSMGTFPALYYGASFEPHAIIVGKPLANLGTIASRGRLDAPGVSNLAFDCLIHHTGGTSSQDMTELDQRFWKIFKQANFSKTTFGLSYMKDEEMDPQAYEQLVSYLCNTGAKILSKGTAGRHNDDTDTNISWFLHFYRMVLETGFGREKR

SEQ ID NO: 13698 - protein, 1216 aa, Streptococcus pneumoniae
MKLIPFLSEEEIQKLQEAEANSSKEQKKTAEQIEAIYTSGQNILVSASAGSGKTFVMAERILNQLARGVEISQLFISTFTVKAATELKERLEKKISKKIQETDDVDLKQHLGRQLADLPNAAIGTMDSFTQKFLGKHGYLLDIAPNFRILQNQSEQLLLENEVFHEVFEAHYQGKQKETFSHLLKNFAGRGKDERGLRQQVYKIYDFLQSTSNPQKWLSESFLKGFEKADFTSEKEKLTEQIKQALWDLESFFRYHLDNDAKEFAKAAYLENVQLILDEIGSLNQESDSQAYQAVLARVVAISKEKNGRALTNASRKADLKPLADAYNEERKTQFAKLGQLSDQITILDYQERYHQDTWELAKTFQTFMSHFVEAYRQRKRQENAFEFADISHYTIEILENFPQVRESYQERFHEVMVDEYQDTNHIQERMLELLSNGHNRFMVGDIKQSIYRFRQADPQIFNEKFQRYAQNPQEGKLILLKANFRSSSEVLSATNDVFERLMDQEVGEINYDNKHQLVFANTKLTPNPDNKAEFLLYDKDDTGEEEESQTETKLTGEMRLVIKEILKLHQEKGVAFKEIALLTSSRSRNDQILLALSEYGIPVKTDGEQNNYLQSLEVQVMLDTLRVIHNPLQDYALVALMKSPMFGFDEDELARLSLQKAEDKVHENLYEKLVNAQKMASSQKGLIHTALAEKLKQFMDILASWRLYAKTHSLYDLIWKIYNDRFYYDYVGALPNGPARQANLYALALRADQFEKSNFKGLSRFIRMIDQVLEAQHDLASVAVAPPKDAVELMTIHKSKGLEFPYVFILNMDQDFNKQDSMSEVILSRQNGLGVKYIAKMETGAVEDHYPKTIKLSIPSLTYRQNEEELQLASYSEQMRLLYVAMTRAEKKLYLVGKGSREKLEVKQYPAAKNGKLNSNTRLQARNFQDWLWAISKVFTKDKLNFSYRFIGEDQLTREAIGELETKSPLQDSSQADNRQSDTIKEALEMLKEVEVYNTLHRAAIELPSVQTPSQIKKFYEPVMDMEGVEIAGQGQSVGKKISFDLPDFSTKEKVTGAEIGSATHELMQRIDLSQQLTLASLTETLKQVQTSQAVRDKINLDKILAFFDTVLGQEILANTDHLYREQPFSMLKRDQKSQEDFVVRGILDGYLLYENKIVLFDYKTDRYDEPSQLVDRYRGQLALYEEALSRAYSIENIEKYLILLGKDEVQVVKV

SEQ ID NO: 13699 - protein, 737 aa, Streptococcus pneumoniae
MAKQVFQTTFAGRELIVETGQVAKQANGSVVVRYGESTVLTAAVMSKKMATGDFFPLQVNYEEKMYAAGKFPGGFMKREGRPSTDATLTARLIDRPIRPMFAEGFRNEVQVINTVLSYDENASAPMAAMFGSSLALSISDIPFDGPIAGVQVGYVDGQIIINPSQEQAEQSLLELTVAGTKHAINMVESGAKELSEEIMLEALLKGHEAVKELIAFQEEIVAAVGKEKAEVELLHVDAELQAEIIAAYNSDLQKAVQVEEKLAREAATQAVKDQVTAVYEEKYANHEEFDRIMRDVAEILEQMEHAEVRRLITEDKVRPDGRKVDEIRPLDAVVDFLPRVHGSGLFTRGQTQALSVLTLAPMGETQIIDGLDPEYKKRFMHHYNFPQYSVGETGRYGAPGRREIGHGALGERALAQVLPSLEEFPYAIRLVAEVLESNGSSSQASICAGTLALMTGGVPIKAPVAGIAMGLISDGNNYTVLTDIQGLEDHFGDMDFKVAGTRDGITALQMDIKIQGITAEILTEALAQAKKARFEILDVIEATIPEVRPELAPTAPKIDTIKIDVDKIKIVIGKGGETIDKIIAETGVKIDIDEEGNVSIYSSDQDAINRAKEIIAGLVREAKVDEVYRAKVVRIEKFGAFVNLFDKTDALVHISEMAWTRTNRVEDLVEIGDEVDVKVIKIDEKGRIDASMKALLPRPPKPEHDEKGEKSERPHRPRHHKDHKPKKEFTETPKDSE

SEQ ID NO: 13700 - protein, 375 aa, Streptococcus pneumoniae; identical to SEQ ID NO: 13383

SEQ ID NO: 13701 - protein, 169 aa, Streptococcus pneumoniae; identical to SEQ ID NO: 13384

SEQ ID NO: 13702 - protein, 442 aa, Streptococcus pneumoniae; identical to SEQ ID NO: 13237

SEQ ID NO: 13703 - protein, 490 aa, Salmonella typhi
  VARIANT (1)...(490): Xaa = Any Amino Acid
MVPVVALVGRPNVGKSTLFNRLTRTRDALVADFPGLTRDRKYGRAEVEGREFICIDTGGIDGTEDGVETRMAEQSLLAIEEADVVLFMVDARAGLMPADEAIAKHLRSREKPTFLVANKTDGLDPDQAVVDFYSLGLGEIYPIAASHGRGVLSLLEHVLLPWMDDVAPQEEVDEDAEYWAQFEAEQNGEEAPEDDFDPQSLPIKLAIVGRPNVGKSTLTNRILGEERVVVYDMPGTTRDSIYIPMERDEREYVLIDTXXVRKRGKITDAVEKFSVIKTLQAIEDANVVLLVIDAREGISDQDLSLLGFILNSGRSLVIVVNKWDGLSQEVKEQVKETLDFRLGFIDFARVHFISALHGSGVGNLFESVREAYDSSTRRVSTAMLTRIMTMAVEDHQPPLVRGRRVKLKYAHTGGYNPPIVVIHGNQVKDLPDSYKRYLMNYFRKSLEVMGTPIRIQFKEGENPYANKRNTLTPTQMRKRKRLMKHIKKSK

SEQ ID NO: 13704 - protein, 424 aa, Salmonella typhi
  VARIANT (1)...(424): Xaa = Any Amino Acid
MAKNIQAIRGMNDYLPGETAIWQRIEGTLKNVLGSYGYSEIRLPIVEQTPLFKRAIGEVTDVVEKEMYTFEDRNGDSLTLRPEGTAGCVRAGIEHGLLYNQEQRLWYIGPMFRHERPQKGRYRQFHQLGAEVFGLQGPDIDAELIMLTARWWRALGISEHVSLELNSIGSLEARANYRDALVAFLEQHQETLDEDCKRRMYTNPLRVLDSKNPDVQALLNDAPVLGDYLDDDSREHFAGLCKLLDAAGIAYTVNQRLVRGLDYYNRTVFEWVTNSLGSQGXVCAGGRYDGLVEQLGGRATPAVGFAMGLERLVLLVQAVNPEFIASPVVDIYLVAAGAQTQSAAMTLAERLRDEMPGVKLMTNHGGGNFKKQFARADKWGARIALVLGESEVADGTVVVKDLRSGEQTAVAQDSVAAHLRTLLG

SEQ ID NO: 13705 - protein, 452 aa, Salmonella typhi
MAHMLSSQTSSIFTVSRLNQTVRLLLEQEMGQVWISGEISNFTQPASGHWYFTLKDDTAQVRCAMFRNSNRRVTFRPQHGQQVLVRANITLYEPRGDYQIIAESMQPAGEGLLQQKYEQLKAKLHAEGLFDQQHKQPLPSPAHCVGVITSKTGAALHDILHVLKRRDPSLPVIIYPTAVQGDDAPGQIVRAIELANTRGECDVLIVGRGGGSLEDLWSFNDERVARAIFASRIPVVSAVGHETDVTIADFVADLRAPTPSAAAEIVSRNQQELLRQIQSAQQRLGMAMDYYLANRSRRFTQIFHRLQQQHPQLRLARQQTALERLRQRMGFALEARIKQATQRQQRVSQRLSQQNPQPRIHRVQSRIQQLEYRLTENIRSRLSEQRERFGNAVTHLEAVSPLATLARGYTVSTTTDGKVLKKIKQVKAGDIMTTRLEDGWLESEVKSVTPGT

SEQ ID NO: 13706 - protein, 225 aa, Salmonella typhi
  VARIANT (1)...(225): Xaa = Any Amino Acid
MRSAEPMLADYAPLNKVDSARRCGLYHGRLEKQPQFSLESWWAEYNIDGLTIKTLPGVFSRDGLDVGSQLLLSTLTPHTKGKVLDVGCGAGVLSAALASHSPKVRLTLCDVSAPAVEASRATLAANGLEGEVFASNVFSEVKGRFDMIXSNPPFHDGXQTSLDAAQTLIRGAVRXLNSGGELRIVANAFLPYPKILDETFGFHEVIXXTGRXKXYRXVMTXQXKN

SEQ ID NO: 13707 - protein, 440 aa, Salmonella typhi
MFLAQEIIRKKRDGHALSDEEIRFFINGIRDNTISEGQIAALAMTIFFHDMTMPERVSLTMAMRDSGTVLDWKSLNLNGPIVDKHSTGGVGDVTSLMLGPMVAACGGYVPMISGRGLGHTGGTLDKLEAIPGFDIFPDDNRFREIIQDVGVAIIGQTSSLAPADKRFYATRDITATVDSIPLITGSILAKKLAEGLDALVMDVKVGSGAFMPTYELSEALAEAIVGVANGAGVRTTALLTDMNQVLASSAGNAVEVREAVQFLTGEYRNPRLFDVTMALCVEMLISGQLAKDDAEARAKLQAVLDNGKAAEVFGRMVAAQKGPSDFVENYDKYLPTAMLSKAVYADTEGFISAMDTRALGMAVVSMGGGRRQASDTIDYSVGFTDMARLGDSIDGQRPLAVIHAKDEASWQEAAKAVKAAIILDDKAPASTPSVYRRITE

SEQ ID NO: 13708 - protein, 460 aa, Salmonella typhi
  VARIANT (1)...(460): Xaa = Any Amino Acid
MAKAPKRAFVCNECGADYPRWQGQCSACQAWNTITEVRLAASPTVARNERLSGYAGSAGVSKVQKLSDISLEELPRFSTGFKEFDRVLGGGVVPGSAILIGGNPGAGKSTLLLQTLCKLAEQMKTLYVTGEESLQQVAMRAHRLGLPTANLNMLSETSIEQICLIAEEEQPKLMVIDSIQVMHMADIQSSPGSVAQVRETAAYLTRFAKTRGVAIVMVGHVTKDGSLAGPKVLEHCIDCSVLLDGDADSRFRTLRSHKNRFGAVNELGVFAMTEQGLREVSNPSAIFLSRGDEVTSGSSVMVVWEGTRPLLVEIXALVDHSMMANPRRVAVGLEQNRLAILLAVLHRHGGLQMSDQDVFVNVVGGVKVTETSADLALLLAMVSSLRDRPLPQDLVVFGEVGLAGEIRPVPSGQERISEAAKHGFRRAIVPAANVPKKPPEGMQVFGVKKLADALSVFDDL

SEQ ID NO: 13709 - protein, 555 aa, Salmonella typhi
  VARIANT (1)...(555): Xaa = Any Amino Acid
MAQFVYTMHRVGKVVPPKRHILKNISLSFFPGAKIGVLGLNGAGKSTLLRIMAGLDKDIEGEARPQPGIKIGYLPQEPQLNPEHTVRESIEEAVSEVVNALKRLDEVYALYADPDADFDKLAAEQGRLEEIIQAHDGHNLNVQLERAADALRLPDWDAKVEKLSGGERRRVALCRLLLEKPDMLLLDEPTNHLDXESVAWLERFLHDFEGTVVAITHDRYFLDNVAGWILELDRGXGIPWEGNYSSWLEQKDQRLAQEASAEAARRKSIEKELEWVRQGAKGRQSKGKARLARFEELNSVEYQKRNETNELFIPPGPRLGDKVIEVSNLRKSYGDRVLIDDLSFSVPKGAIVGIIGPNGVGKSTLFRMMSGQEQPDSGTITLGETVKLASVDQFRDAMDNSKTVWEEVSGGLDIMKIGNTEMPSRAYVGRFNFKGVDQGKRVGELSGGERGRLHLAKLLQVGGNVLLLDEPTNDLDIETLRALENALLEFPGCAMVISHDRWFLDRIATHILDYQDEGKVEFFEGNFTEYEEYKKRTXGAEALEPKRIKYKRIAK

SEQ ID NO: 13710 - protein, 215 aa, Salmonella typhi
  VARIANT (1)...(215): Xaa = Any Amino Acid
MLQVYLVRHGETQWNAERRIQGQSDSPLTAKGEQQAMQVGERARSXGITHIISSDLGRTKRTAEIIAQACGCDITFDFRLRELDMGVLEKRQIDSLTEEEEGWRRQLVNGTQDGRIPGGESMQELSDRVHAALASCLELPQGSRPLLVSHGIALGCLVSTILGLPAWAERRLRLRNCSISRIDYQESQWLASGWVVETAGDVSHLDTPALDELQR

SEQ ID NO: 13711 - protein, 309 aa, Salmonella typhi
MVKVYAPASSANMSVGFDVLGAAVTPVDGTLLGDVVSVEAADHFRLHNLGRFADKLPPEPRENIVYQCWERFCQALGKTIPVAMTLEKNMPIGSGLGSSACSVVAALVAMNEHCGKPLNDTRLLALMGELEGRISGSIHYDNVAPCFLGGMQLMIEENGIISQQVPGFDEWLWVLAYPGIKVSTAEARAILPAQYRRQDCIAHGRHLAGFIHACYSRQPQLAAALMKDVIAEPYRARLLPGFSQARQAVSEIGALASGISGSGPTLFALCDKPETAQRVADWLSKHYLQNQEGFVHICRLDTAGARVVG

SEQ ID NO: 13712 - protein, 485 aa, Salmonella typhi
  VARIANT (1)...(485): Xaa = Any Amino Acid
MSASTRGTLMPEFFSFINEILWGSVMIYLLLGAGCWFTWRTGFIQFRYIRQFSRSLKGSLSPQPGGLTSFQALCTSLAARIGSGNLAGVALAIAAGGPGAVFWMWVSAIIGMATSFAECSLAQLYKERDPTGQFRGGPAWYMARGLGMRWMGVVFALFLLVAYGLIFNSVQANAVSRALHFAFNIPPLISGIALAFCALLIIIRGIKGVARXMQWLIPLIALLWVAGSVFICLWHIEQMPGVIASIVKSAFGWQEAAAGAAGYTLTQAITSGFQRGMFSNEAGMGSTPNAAAAATSYPPHPVAQGIVQMIGVFSDTIIICTASAMIILLAGNHASHSSTEGIQLLQHAMVSLTGEWGASFVALIVILFAFSSIVANYIYAENNLFFLRLHNAKAIWLLRLATLGMVIAGTLISFPLIWQLADMIMACMAITNLTAILLLSPVVYTLAGDYLRQRKLGVRPQFDPRRFPDIEPQLAPDTWDAASRD

SEQ ID NO: 13713 - protein, 638 aa, Salmonella typhi
MGKIIGIDLGTTNSCVAIMDGTQARVLENAEGDRTTPSIIAYTQDGETLVGQPAKRQAVTNPQNTLFAIKRLIGRRFQDEEVQRDVSIMPYKIIGADNGDAWLDVKGQKMAPPQISAEVLKKMKKTAEDYLGEPVTEAVITVPAYFNDAQRQATKDAGRIAGLEVKRIINEPTAAALAYGLDKEVGNRTIAVYDLGGGTFDISIIEIDEVDGEKTFEVLATNGDTHLGGEDFDTRLINYLVDEFKKDQGIDLRNDPLAMQRLKEAAEKAKIELSSAQQTDVNLPYITADATGPKHMNIKVTRAKLESLVEDLVNRSIEPLKVALQDAGLSVSDINDVILVGGQTRMPMVQKKVAEFFGKEPRKDVNPDEAVAIGAAVQGGVLTGDVKDVLLLDVTPLSLGIETMGGVMTPLITKNTTIPTKHSQVFSTAEDNQSAVTIHVLQGERKRASDNKSLGQFNLDGINPAPRGMPQIEVTFDIDADGILHVSAKDKNSGKEQKITIKASSGLNEEEIQKMVRDAEANAESDRKFEELVQTRNQGDHLLHSTRKQVEEAGDKLPADDKTAIESALSALETALKGEDKAAIEAKMQELAQVSQKLMEIAQQQHAQQQAGSADASANNAKDDDVVDAEFEEVKDKK

SEQ ID NO: 13714 - protein, 187 aa, Salmonella typhi
MSLINTKIKPFKNQAFKNGEFIEVTEKDTEGRWSVFFFYPADFTFVCPTELGDVADHYEELQKLGVDVYSVSTDTHFTHKAWHSSSETIAKIKYAMIGDPTGALTRNFDNMREDEGLADRATFVVDPQGIIQAIEVTAEGIGRDASDLLRKIKAAQYVAAHPGEVCPAKWKEGEATLAPSLDLVGKI

SEQ ID NO: 13715 - protein, 117 aa, Salmonella typhi
MNHQERELMFGKGGLGNLMKQAQQMQEKMQKMQEEIAQLEVTGESGAGLVKVTINGAHNCRRVEIDPSLLEDDKEMLEDLVAAAFNDAARRIEETQKEKMASVSSGMQLPPGFKMPF

SEQ ID NO: 13716 - protein, 201 aa, Salmonella typhi
MQTSPLLTQLMEALRCLPGVGPKSAQRMAFTLLQRDRSGGMRLAQALTRAMSEIGHCADCRTFTEQDVCNICSNPRRQENGQICVVESPADIYAIEQTGQFSGRYFVLMGHLSPLDGIGPDDIGLDRLEQRLASEKISELILATNPTVEGEATANYIAELCAEAGVEASRIAHGVPVGGELEMVDGTTLSHSLAGRHKIIF

SEQ ID NO: 13717 - protein, 214 aa, Salmonella typhi
MRIILLGAPGAGKGTQAQFIMEKYGIPQISTGDMLRAAVKSGSELGKQAKDIMDAGKLVTDELVIALVKERIAQEDCRNGFLLDGFPRTIPQADAMKEAGIVVDYVLEFDVPDELIVDRIVGRRVHAASGRVYHVKFNPPKVEGKDDVTGEDLTTRKDDQEETVRKRLVEYHQMTAPLIGYYQKEAEAGNTKYAKVDGTQAVADVRAALEKILG

SEQ ID NO: 13718 - protein, 842 aa, Salmonella typhi
MTNHKGVFTMSQTIDLTLDGLSCGHCVKRVKESLEQRPDVELADVTVTEAHVTGTASADALIETIKQAGYGATLSHPKAKPLTESSIPSEALAAVPHELPVATADEESQQLLLSGMSCASCVTRVQHALQSVPGVTQARVNLAERTALVMGSASAADLVQAVEKAGYGAEAIEDDIKRRERQQETAIATMKRFRWQAIVALAVGIPVMVWGMIGDNMMVTGDNRSLWLAIGLITLAVMVFAGGHFYRNAWKSLLNGTATMDTLVALGTGVAWLYSMSVNLWPQWFPMEARHLYYEASAMIIGLINLGHMLEARARQRSSKALEKLLDLTPPTARVVTEDGEKSVPLADVQPGMLLRLTTGDRVPVDGEITQGEAWLDEAMLTGEPIPQQKGEGDSVHAGTVVQDGSILFRASAVGSHTTLSRIIRMVRQAQSSKPEIGQLADKISAVFVPVVVAIALFSAAIWYFFGPAPQIVYTLVIATTVLIIACPCALGLATPMSIISGVGRAAEFGVLVRDADALQRASTLDTLVFDKTGTLTEGKPQVVAVKTFNGVDEAQALRLAAALEQGSSHPLAHAILEKAGDDKLPQVNGFRTLRGLGVSGEAEGHQLLLGNQALLNEQHVATDDMTAEITAQASQGSTPVLLAIDGKAAALLAVRDPLRSDSIAALERLHNAGYRLVMLTGDNPTTANAIAKEAGIDEVIAGVLPDGKADAIKRLQSQGRQVAMVGDGINDAPALAQADVGIAMGGGSDVAIETAAITLMRHSLMGVADALAISRATLRNMKQNLLGAFIYNSIGIPVAAGILWPFTGTLLNPVVAGAAMALSSITVVSNANRLLRFKPKA

SEQ ID NO: 13719 - protein, 1049 aa, Salmonella typhi
MPNFFIDRPIFAWVIAIIIMLAGGLAILKLPVAQYPTIAPPAVTISATYPGADAKTVQDTVTQVIEQNMNGIDNLMYMSSNSDSTGTVQITLTFESGTDADIAQVQVQNKLQLAMPLLPQEVQQQGVSVEKSSSSFLMVVGVINTDGTMTQEDISDYVAANMKDPISRTSGVGDVQLFGSQYAMRIWMNPTELTKYQLTPVDVINAIKAQNAQVAAGQLGGTPPVKGQQLNASIIAQTRLTSTDEFGKILLKVNQDGSQVRLRDVAKIELGGENYDVIAKFNGQPASGLGIKLATGANALDTATAIRAELKKMEPFFPPGMKIVYPYDTTPFVKISIHEVVKTLVEAIILVFLVMYLFLQNFRATLIPTIAVPVVLLGTFAVLAAFGFSINTLTMFGMVLAIGLLVDDAIVVVENVERVMTEEGLPPKEATRKSMGQIQGALVGIAMVLSAVFIPMAFFGGSTGAIYRQFSITIVSAMALSVLVALILTPALCATMLKPVAKGDHGEGKKGFFGWFNRLFDKSTHHYTDSVWNILRSTGRYLLLYLIIVVGMAYLFVRLPSSFLPDEDQGVFLTMVQLPAGATQERTQKVLDEVTDYYLNKEKANVESVFAVNGFGFAGRGQNTGIAFVSLKDWADRPGEKNKVEAITQRATAAFSQIKDAMVFAFNLPAIVELGTATGFDFELIDQAGLGHEKLTQARNQLFGEVAKYPDLLVGVRPNGLEDTPQFKIDIDQEKAQALGVSISDINTTLGAAWGGSYVNDFIDRGRVKKVYVMSEAKYRMLPDDINDWYVRGSDGQMVPFSAFSSSRWEYGSPRLERYNGLPSMEILGQAAPGKSTGEAMAMMEELASKLPSGIGYDWTGMSYQERLSGNQAPALYAISLIVVFLCLAALYESWSIPFSVMLVVPLGVIGALLAATFRGLTNDVYFQVGLLTTIGLSAKNAILIVEFAKDLMDKEGKGLVEAMLEAVRMRLRPILMTSLAFMLGVMPLVISSGAGSGAQNAVGTGVLGGMVTATVLAIFFVPVFFVVVRRRFSRKSEDIEHSHSTEHR

SEQ ID NO: 13720 - protein, 276 aa, Salmonella typhi
MGLRQSLRIAASTLLLACGLQFAHADGSPQTIVFGVAPGPYGDMVKQAIAPTLKEKGYKVVVREFSDYVQPNMALANGSIDANLFQHTLYFDKFTADKGLKLSKLIVVPTAGMGFYSRKINSLDALKKGDIITLSNDPTNLARGLRFLQSLGLITIKHNIDPTKASERDIASNPKGLVFKPLEAAQLPRTLDGVTGALVNGNFAVAAGLDLSSAIKQEHLDENLKNIIAVRSEDADKPFAKDIVEAVKSPAYRAVIDDPKNIYSAFQKPEWMTATP

SEQ ID NO: 13721 - protein, 297 aa, Salmonella typhi
  VARIANT (1)...(297): Xaa = Any Amino Acid
MNMIEIEKVCVDFTAGRGTPTRAVDDVSLHIAAGEIFGIVGTSGAGKSTLLRTLNALTRPSQGRVNVNGVEISALDGKALRQARQRIGMIFQHFNLMHTRTVAKNVAFSLKAAGWERSKIAPRVAEILTLVGLADKANCFPVQLSGGQKQRVGIARAIANHPDVLLCDEPTSALDLETSATILALLRQINAQLGITIVLITHEMNVIKSICDRVAVMSGGKIVESGEVFDVXAHPQHAFTQXLVSHTXNLTLPXTLXGTPARAVAENFVYRRFGGAAGTVGGGDQVWRRGQYPAWQD

SEQ ID NO: 13722 - protein, 219 aa, Salmonella typhi
  VARIANT (1)...(219): Xaa = Any Amino Acid
MDDLLPDLTLAXNETFQMLSISTVLAILGGLPLGFLIFVTDRHLFWQNRFIYLVASVLVNIIRSVPFVILLVLLLPLTQLLLGNTIGPIAASVPLSVAAIAFYARLVDSALREVDKGIIEAALAFGASPMRIICTVLLPEASAGLLRGLTITLVSLIGYSAMAGIVGGGGVGDLAIRYGYYRYETEVMVVTVVALIVLVQVVQMLGDWLAKRADKRDRH

SEQ ID NO: 13723 - protein, 470 aa, Salmonella typhi
MKCALFKNYLYPYKEFVMSFDLIIKNGTVILENEARVIDIAVQGGKIAAIGENLGEAKNVLDATGLIVSPGMVDAHTHISEPGRTHWEGYETGTRAAAKGGITTMIEMPLNQLPATVDRETIELKFDAAKGKLTIDAAQLGGLVSYNLDRLHELDEVGVVGFKCFVATCGDRGIDNDFRDVNDWQFYKGAQKLGEMDQTVLVHCENALICDELGEEAKREGRVTAHDYVASRPVFTEVEAIRRVLYLAKAAGCRLHVCHISSPEGVEEVTRARQEGQDVTCESCPHYFVLDTDQFEEIGTLAKCSPPIRDQENQKGMWEKLFNGEIDCLVSDHSPCPPEMKAGNIMQAWGGIAGLQNCMDVMFDEAVQKRGMSLPMFGKLMATNAADIFGLKHKGRIAPGKDADLVFIQPDSSYVLKNEDLEYRHKVSPYVGRTIGARITKTILRGDVIYDIEHGFPVPPKGQFILKHQQ

SEQ ID NO: 13724 - protein, 1294 aa, Salmonella typhi
  VARIANT (1)...(1294): Xaa = Any Amino Acid
MTQRXPLVAAQPGIWMAEKLSDLPSAWSVAHYVELNGELDAPLLAKAVAVGMQQADTLRMRFTEENGEVWQWIDPEHTFGEPPIADLRDQPDPHLAALALMQADLRQNLRADSGKPLAFHQLIRIDDTRWYWYQRYHHLLVDGFSFPAITRQIAAIYRAWQSDAPTPESPFTPFVDVVEEYQRYRQSEAWQRDGAFWAQQRRELPPPASMSAAPLPGRSASADILRMKLSAPAGAFRQLAAHMPEIPRADLALALVTLWLGRLCGRMDYAAGFIFMRRMGSAALTATGPVLNVLPLAVNLHATEDLPTLAKRLAAQLKKMRRHQRYDAEQIVRDSGRAAGETPLFGPVLNIKVFDYHLDFPGIQAQTHTLATGPVNDLELALFPDENGGLDIELLANAQRYDDATLSRHALRLMALITQFADNPALRCGDAQMLLAEEQTQLTHLNNTAVTIPAATLSDLVAQQAQKTPEASALADAHYHFTYREMREQVVALAYALRERGVQPGDSVAVALPRSVFLTLALHGIVEAGAAWLPLDTGYPDDRLRMMLEDAQPKLLITTXAQLARFHDIPGMEYLCYSQPLPVSDATPLGLSLPHHTAYIIFTSGSTGRPKGVMVGQTAIVNRLLWMQDHYPLTADDVVAQKTPCSFDVSVWEFFWPFIAGAKLVMAEPEAHRDPLAMQRFFAQYGVTTTHFVPSMLAAFIASLTPASAGKSCASLKRVFCSGEALPTALCREWETLTNAPLHNLYGPTEAAVDVSWYPACGDELAAVDGNSIPIGYPVWNTGLRILDAHMQPVPPGVAGDLYLTGIQLAQGYLGRPDLTASRFIADPFAPGERMYRTGDVARWLDSGVVEYLGRSDDQLKIRGQRIELGEIDRVMQTLPDVEQAVAHACVFNQAAATGGDARQLVGYLVSHSGLPLDLPALQDKLRQKLPAHMVPVVLLQLASLPLSANGKLDRKALPLPDLTPRVKGRAPQSATEIAVAAAFSRLLGCEINDVESDFFALGGHSLLAMKLAAQLSQTFNRQVTPGQVMVASDVAQLSKLLDTDDDERSRNLGFGPLLPLRESDGPTLFCFHPASGFAWQFSVLSRYLSPSWSIMGIQSPRPVGPMQIATTLDEVCEHHLATLLARQPHGPYYLLGYSLGGTLAQGIAARLRARGETVAFLGLLDTWPPETQNWRGKEANGLNPDVLAEIERERAAFVAAQQGNASDALFTAIEGNYADAVRLLTTAHSAPFDGHATLFVADKTVPEDVSPEQSWSPWIASLAIYRQPCAHVDIISPSAFETIGPIISELINK

SEQ ID NO: 13725 - protein, 311 aa, Salmonella typhi
  VARIANT (1)...(311): Xaa = Any Amino Acid
MRRVITTGRRCVRAATVYALSASSGRGHRQPRRYLPYRLVNSGVXQKMTESVARLRGDQLTLGYGSYTVAKNLNVSIPDGHFTAIIGPNGCGKSTLLRTLSRLMTPVDGHVWLDGEQIQRYASKEVARRIGLLAQNATTPGDITVQELVARGRYPHQPLFTRWRKEDADAVASAMRATGITSLAAQSVDTLSGGQRQRAWIAMVLAQETSIMLLDEPTTWLDISHQIDLLELLSDLNREKGYTLAAVLHDXNQACRYATHLIALREGNIVAQGAPKEIVTAELIEKIYGLRCMIIDDPVAGTPLVVPLGRR

SEQ ID NO: 13726 - protein, 330 aa, Salmonella typhi
  VARIANT (1)...(330): Xaa = Any Amino Acid
MMXLSRRLIVSCLLLAAGCFAIGLWSLQSGAVPLETGQIIAALLGDAPRNITLVVTEWRLPRVLMALLIGAALGVSGAIFQSLMRNPLGSPDVMGFNTGAWSGVLVAMVLFGQHLTAIALAAMAGGIVTSLIVWLLAWRNGIETFRLIIIGIGIRAMLVAFNTWLLLQASLETALTAGLWNAGSLNGLTWAKTWPSAPLIMVMLTGAALLVRRMRLLEMGDDSACALGVSVERSRLMLMLVAVSLTAAATALAGPISFIALVAPHIARRLSGTARWGLTQSALCGALLLLAADACAQQLFMPYQLPVGVVTVSLGGIYLIVLLIQESXKK

SEQ ID NO: 13727 - protein, 472 aa, Salmonella typhi
  VARIANT (1)...(472): Xaa = Any Amino Acid
MSQNVYQFIDLQRVDPPKXPLKLXKIEFVEIYXXFXEGQAKAQADRCLSCGNPYCEWKCPVHNYIPNWLKLANEGRIFEAAELSHQTNTLPEVCGRVCPQDRLCEGSCTLHDEFGAVTIGNIERYINDKAFEMGWRPDMTGVRQTDKRVAIIGAGPAGLACADVLTRNGVKAVVFDRHPEIGGLLTFGIPAFKLEKEVMTRRREIFTGMGIEFKLNTEVGRDVQLEDLLKDYDAVFLGVGTYQSMRGGLENEDADGVFDALPFLIANTKQIMGFGETSDEPYVSMEGKRVVVLGGGDTAMDCVRTSIRQGATHVTCAYRRDEENMPGSRREVKNAREEGVEFQFNVQPLGIEVNANGKVSGVKMVRTEMGEPDAKGRRRAEIVAGSEHVVPADAVVMAFGFRPHSMEWLAKHSVELDSQGRIIAPERSDNAFQTSNPKIFAGGDIVRGSDLVVTAIAEGRKAADGIMNYLEV

SEQ ID NO: 13728 - protein, 1486 aa, Salmonella typhi
MLYDKSLEKDNCGFGLIAHIEGEPSHKVVRTAIHALARMQHRGAILADGKTGDGCGLLLQKPDRFFRIVAEERGWRLAKNYAVGMIFLNKDPELAAASRHIVEEELQQETLSIVGWRDVPTNEGVLGEIALSSLPRIEQIFVNAPAGWRPRDMERRLFIARRRIEKRLQDDKDFYVCSLSNLVNIYKGLCMPADLPRFYLDLADLRLESAICLFHQRFSTNTVPRWPLAQPFRYLAHNGEINTITGNRQWARARTYKFQTPLIPDLQSAAPFVNETGSDSSSLDNMLELLLAGGMDIIRAMRLLVPPAWQNNPDMDQDLRAFFDFNSMHMEPWDGPAGIVMSDGRFAACNLDRNGLRPARYVITKDKLITCASEVGIWDYQPDEVVEKGRVGPGELMVIDTRGGRILHSAETDDDLKSRHPYKAWMEKNVRRLVPFEELPDEEVGSRELDDDLLASYQKQFNYSAEELDSVIRVLGENGQEAVGSMGDDTPFAVLSSQPRIIYDYFRQQFAQVTNPPIDPLREAHVMSLATSIGREMNVFCEAEGQAHRLSFKSPILLYSDFKQLTTMSEHHYRADWLDITFDVTETTLDATVKALCDKAEQMVRNGTVLLVLSDRNIGKNRLPVPAPMAVGAVQTRLVDQSLRCDANIIVETGSARDPHHFAVLLGFGATAIYPYLAYETLGRLIDTQAIAKNYRTVMQNYRNGINKGLYKIMSKMGISTIASYRCSKLFEAVGLHDDVVNLCFQGVVSRIGGASFDDFQQDLLNLSKRAWLARKPISPGGLLKYVHGGEYHAYNPDVVRTLQQAVQSGEYSDYQEYAKLVNERPAATLRDLLAIHPDGEAVTIDEVEPASELFKRFDTAAMSIGALSPEAHEALAEAMNSLGGNSNSGEGGEDPARYGTNKVSRIKQVASGRFGVTPAYLVNADVIQIKVAQGAKPGEGGQLPGDKVTPYIAKLRYSVPGVTLISPPPHHDIYSIEDLAQLIFDLKQVNPKAMISVKLVSEPGVGTIATGVAKAYADLITIAGYDGGTGASPLSSVKYAGCPWELGLVETQQALVANGLRHKIRLQVDGGLKTGVDIIKAAILGAESFGFGTGPMVALGCKYLRICHLNNCATGVATQDEKLRKNHYHGLPFKVTNYFEFIAREVRELMASLGVTRLVDLIGRTDLLKELEGFTAKQQKLALSRLLETAEPHPGKALYCTENNPPFDNGVLNAQLLQQAKPFVDARQSKTFWFDIRNTDRSVGASLSGYIAQTHGDQGLASDPIKAHFSGTAGQSFGVWNAGGVELYLTGDANDYVGKGMAGGLIAIRPPVGSAFLSHKASIIGNTCLYGATGGRLYAAGRAGERFGVRNSGAITVVEGIGDNGCEYMTGGIVCVLGKTGVNFGAGMTGGFAYVLDEDGEFRKRVNPELVEVLDVDSLAIHEEHLRGLITEHVQHTGSQRGEEILSRWSSFSTQFALVKPKSSDVKALLGHRSRSAAELRVQAQ

SEQ ID NO: 13729 - protein, 142 aa, Salmonella typhi
  VARIANT (1)...(142): Xaa = Any Amino Acid
MKTFTAKPXTVKRDWYVVDATGKTLGRLATELARRLRGKHKAEYTPHVXTGDYIIVLNADXVAVTGNKRTDKVYYHHTGHIGGIKQATFEEMIARRPERVIEIAXKXMLPKXPLGRAMFRKLKVYAGNEHNHAAQQPQVLDI

SEQ ID NO: 13730 - protein, 242 aa, Salmonella typhi
MSKRRIAPLTFLRRLLLRILAALAVFWGGGIALFSVVPVPFSAVMAERQISAWLGGEFGYVAHSDWVSMADISPWMGLAVIAAEDQKFPEHWGFDVPAIEKALAHNERNESRIRGASTLSQQTAKNLFLWDGRSWVRKGLEAGLTLGIETVWSKKRILTVYLNIAEFGDGIFGVEAAAQRYFHKPASRLSVSEAALLAAVLPNPLRYKANAPSGYVRSRQAWIMRQMRQLGGESFMTRNQLN

SEQ ID NO: 13731 - protein, 284 aa, Salmonella typhi
MVLMIVSGRSGSGKSVALRALEDMGFYCVDNLPVVLLPDLARTLADRQISAAVSIDVRNIPESPEIFEQAMNNLPGAFSPQLLFLDADRNTLIRRYSDTRRLHPLSSKNLSLESAIDKESDLLEPLRSRADLIVDTSEMSVHELAEMLRTRLLGKRERELTMVFESFGFKHGIPIDADYVFDVRFLPNPHWDPKLRPMTGLDKPVAAFLDRHTEVHNFIYQTRSYLELWLPMLETNNRSYLTVAIGCTGGKHRSVYIAEQLADYFRSRGKNVQSRHRTLEKRKT

SEQ ID NO: 13732 - protein, 130 aa, Salmonella typhi
MADNQYYGTGRRKSSAARVFIKPGHGNIVINQRSLEQYFGRETARMVVRQPLELVDMVEKLDLYITVKGGGISGQAGAIRHGITRALMEYDESLRGELRKAGFVTRDARQVERKKVGLRKARRRPQFSKR

SEQ ID NO: 13733 - protein, 419 aa, Salmonella typhi
  VARIANT (1)...(419): Xaa = Any Amino Acid
MDKFRVQGPTTLQGEVTISGAKNAALPILFAALLAEEPVEIQNVPKLKDVDTSMKLLSQLGAKVERNGSVHIDASQVNVFCAPYDLVKTMRASIWALGPLVARFGQGQVSLPGGCTIGARPVDLHITGLEQLGATIKLEEGYVKASVEGRLKGAHIVMDKVSVGATVTIMCAATLAEGTTIIENAAREPEIVDTANFLVTLGAKIAGQGTDRITIEGVERLGGGVYRVLPDRIETGTFLVAAAISRGKILCRNAQPDTLDAVLAKLRDAGADIEVGEDWISLDMHGKRPKAVNVRTAPHPAFPTDMQAQFTLLNLVAEGTGFITETVFENRFMHVPELSRMGARAEIESNTVICHGVETLSGXQVMATDLRASASLVLAGCIAEGTTIVDRIYHIDRGYERIEDKLRALGANIERVKGE

SEQ ID NO: 13734 - protein, 323 aa, Salmonella typhi
MNLEKINELTAQDMAGVNATILEQLNSDVQLINQLGYYIISGGGKRIRPMIAVLAARAVGYQGNAHVTIAALIEFIHTATLLHDDVVDESDMRRGKATANAAFGNAASVLVGDFIYTRAFQMMTSLGSLKVLEVMSEAVNVIAEGEVLQLMNVNDPDITEENYMRVIYSKTARLFEAAAQCSGILAGCTPEQEKGLQDYGRYLGTAFQLIDDLLDYSADGEHLGKNVGDDLNEGKPTLPLLHAMRHGTPEQSAMIRTAIEQGNGRHLLEPVLEAMTTCGSLEWTRQRAEEEADKAISALQILPDTPWREALIGLAHIAVQRDR

SEQ ID NO: 13735 - protein, 220 aa, Salmonella typhi
MELYLDTANVAEVERLARIFPIAGVTTNPSIVAASKESIWDVLPRLQNAIGEEGTLFAQTMSRDAKGMVEEAKRLNNAIPGIVVKIPVTAEGLAAIKLLKKEGIVTLGTAVYSASQGLLAALAGAKYVAPYVNRVDAQGGDGIRMVLELQTLLEHHAPDSMVLAASFKTPRQALDCLLAGCQAITLPLDVAQQMLNTPAVESAIEKFEQDWKNAFGNLNL

SEQ ID NO: 13736 - protein, 197 aa, Salmonella typhi
MQKVVLATGNAGKVRELASLLSDFGLDVVAQTKLGVDSAEETGLTFIENAILKARHAAKMTGLPAIADDSGLAVDVLGGAPGIYSARYSGENATDQQNLEKLLHTLRDVPDDKRQARFHCVLVYLRHAEDPTPIVCHGSWPGVITRQAAGNGGFGYDPIFFVPSEGKTAAELTREEKSAISHRGQALKLLLDALRNG

SEQ ID NO: 13737 - protein, 234 aa, Salmonella typhi
MNDIAHNLAHIRDKISAAATRCGRSSEEVTLLAVSKTKPASDIAEAIAAGQRAFGENYVQEGVEKIRHFQEAKVEGLHWHFIGPLQSNKSRLVAEHFDWCHTIDRLRIASRLSEQRPDNLPALNVLIQINISDENSKSGIPLAELDELAAAVATLPRLRLRGLMAIPAPESDYVRQFEVARQMAVAFAGLKARYPDVDTLSLGMSDDMEAAIAAGSTMVRIGTAIFGARDYTKN

SEQ ID NO: 13738 - protein, 259 aa, Salmonella typhi
MPWIAKRRGHDADFFIMRIPRIYHPELLTSGTQISLCEDAANHIGRVLRMGAGQALQLFDGSNQVFDAEIISASKKSVEVQVMKGEIDDRESPLHIHLGQVMSRGEKMEFTIQKSIELGVSLITPLFSERCGVKLDNERLNKKRQQWQKIAIAACEQCGRNRVPEIRPPMALEAWCAEQDSGLRLNLHPRAHASINTLPLPVERVRLLIGPEGGLSADEIAMTARYQFTDILLGPRVLRTETTALTAITALQVRFGDLG

SEQ ID NO: 13739 - protein, 388 aa, Salmonella typhi
  VARIANT (1)...(388): Xaa = Any Amino Acid
MKLNMAKHLFTSESVSEGHPDKIADQISDAVLDAILQQDPKARVACETYVKTGMVLVGGEITTSAWVDIEEITRNTVREIGYVHSDMGFDANSCAVLSAIGKQSPDINQGVDRADPLEQGAGDQGLMFGYATNETDVLMPAPITYAHRLVQRQAEVRKNGTLPWLRPDAKSQVTFQYDDGKIVGIDAVVLSTQHAEDIDQKSLQEAVMEEIIKPILPSEWLNTSTKFFINPTGRFVIGGPMGDCGLTGRKIIVDTYGGMARHGGGAFSGKDPSKVDRSAAYAARYVAKNIVAAGLADRCEIQVSYAIGVAEPTSIMVETFGTEKVPAEQLILLVREFFDLRXYGLIQMLDLLHPIYKETAAYGHFGRENFPWEKTDKAQLLRDAAGLK

SEQ ID NO: 13740 - protein, 704 aa, Salmonella typhi
  VARIANT (1)...(704): Xaa = Any Amino Acid
MFHVHDARLGVNCWQIFRRSPKRAVVKSLRAWPFNIRSGVKMSSRKELANAIRALSMDAVQKAKSGHPGAPMGMADIAEVLWRDFLNHNPTNPSWADRDRFVLSNGHGSMLIYSLLHLTGYDLPMSELQNFRQLHSKTPGHPEVGYTAGVETTTGPLGQGIANAVGMAIAEKTLAAQFNRPGHDIVDHFTYVFMGDGCMMEGISHEVCSLAGTLKLGKLIAFYDDNGISIDGHVEGWFTDDTAKRFEAYGWHVIRGIDGHDADAIKRATEEARAVTDKPSLLMCKTIIGFGSPNKQGTHDSHGAPLGDAEIALTREQLGWKYAPFEIPSEIYAQWDAKEAGQAKESAWNEKFAAYEKAFPQEAAEFTRRMKGDMPADFNAKANEFIAKLQANPSKIASRKASQNAIEAFGPLLPEFLGGSADLAPSNLTLWSGSKAINEDAAGNYIHYGVREFGMTAIANGIALHGGFLPYTSTFLMFVEYARXAVRMAALMKQRQVMVYTHDSIGLGEDGPTHQPVEQVASLRVTPNMSTWRPCDQVESAVAWKYGVERQDGPTALILSRQNLAQQERTEEQLANIARGGYVLKDCAGQPQIIFIATGSEVELAVAAYEKLTAEGVKARVVSMPSTDAFDKQDAAYRESVLPKAVSARVAIEAGIADYWFKYVGLNGAIVGMTTFGESAPAELLFEEFGFTVDNVIAKAKALL

SEQ ID NO: 13741 - protein, 387 aa, Salmonella typhi
  VARIANT (1)...(387): Xaa = Any Amino Acid
MSVIKMTDLDLAGKRVFIRADLNVPVKEGKVTSDARIRASLPTIELALKQGAKVMVTSHLGRPTEGEYNEEFSLLPVVNYLKDKLSNPVRLVKDYLDGVDVAEGELVVLENVRFNKGEKTDDEALSKKYAALCDVFVMDAFGTAHRAQASTHGIXKFADVACAGPLLAAELDALGKALKEPARPMVAIVGGSKVSTKLTVLDSLSKIADQLIVGGGIANTFVAAQGHSVGKSLYEADLVDEAKRLLTTCDIPVPTDVRVATEFSETAPATLKSVNDVKEDEQILDIGDASAQQLAEILKNAKTILWNGPVGVFEFPNFRKGTEIVANAIADSEAFSIAGGGDTLAAIDLFGIADKISYISTGGGAFLEFVEGKVLPAVAMLEERAKK

SEQ ID NO: 13742 - protein, 297 aa, Salmonella typhi
MKRPDYRTLQALDAVIRERGFERAAQKLCITQSAVSQRIKQLENMFGQPLLVRTVPPRPTEQGQKLLALLRQVELLEEEWLGDEQTGSTPLLLSLAVNADSLATWLLPALAPVLADSPIRLNLQVEDETRTQERLRRGEVVGAVSIQHQALPSCLVDKLGALDYLFVASKPFAERYFPNGVTRSSLLKAPAVAFDHLDDMHQAFLQQNFDLPPGSVPCHIVNSSEAFVQLARQGTACCMIPHLQIEKELESGELINLTPGLLQRRMLYWHRFAPESRMMRKVTDALLEYGHKVLRQD

SEQ ID NO: 13743 - protein, 427 aa, Salmonella typhi
MQIHTQHQMAKKDRIGEMAKVSLEKDKIKFLLVEGVHQKALESLRAAGYTNIEYHKGALDAEQLKASIRDAHFIGLRSRTHLTEEVINAAEKLVAIGCFCIGTNQVDLNAAAKRGIPVFNAPFSNTRSVAELVIGELLLLLRGVPEANAKAHRGVWNKLAAGSFEARGKKLGIIGYGHIGTQLGILAESLGMHIYFYDIENKLPLGNATQVQHLSELLNMSDVVSLHVPENASTKNMMGAKEIALMKPGSLLINAARGTVVDIPALCDALATKHLAGAAIDVFPTEPATNSDPFTSPLCEFDNVILTPHIGGSTQEAQENIGLEVAGKLIKYSDNGSTLSAVNFPEVSLPLHGGRRLMHIHENRPGVLTALNQIFAEQGVNIAAQYLQTSARMGYVVIDIEADGDVAEKALLAMKAIPGTIRARLLY

SEQ ID NO: 13744 - protein, 346 aa, Salmonella typhi
  VARIANT (1)...(346): Xaa = Any Amino Acid
MMPRREKLGVDRALAFSEINQQLFQLLNGLDVVYHAXGEYAYADEIVLAALEKLRKGSRQNLTAPATMTDWRPIVHEMRLFKSPEEIAVLRRAGEISALAHIRAMEXCRPGMFEYQLEGEIHHEFNRHGARYPSYNTIVGSGENGCXXHXTENESEMRDGDLVLIDAGCEYKGYXXXITRTFPVNGKFTPAQREIYDIVLESLETSLRLFRPGTSIQQVTGEVVRIMITGLVKLGILQGEVDQLIAENAHRPFFMHGLSHWLGLDVHDVGVYGPDRSRILEPGMVLTVEPGLYIAPDADVPEAYRGIGVRIEDDIVITETGNENLTAGVVKKADDIEALMAAARQQ

SEQ ID NO: 13745 - protein, 433 aa, Salmonella typhi
MNTKIDALNYYGATKKYPLHFPALQDDIDADVVIIGGGFSGINTALELAEQGITNVVVLEARHLGYGGTGRNGGQVMAGIGHDIEAVKKYVGAAGMETLFKISNLGAGIIRERIRKYHIDADFVPGYGYLAYNQRQLKTLQQWEKEFKAATPEDDIELYTGKDVQQVIGSDVYCGVLKHMGGGHVHSLNLLLGSAQAANSLGVKIFEYSPVVEVSYGKTVRVRTAMGSVKAAKLLWACDSFLNNLEPEIYKKTLVTYSYQVSTEPLSSELVERISPLRGAFSDIRPVINYYRLTKENRLLFGSATRFLEYTPHDFAAWNRTLLTEVFPYLKDVKIDFAWGGPMACSANLFPQIGTLREHNNVFYVQGYSGFGVTPSHIVCKILAEGINGGSERYRLMSSIPHATIYGRDSLRLLLVSAGKLIHQTAGFWKGRN

SEQ ID NO: 13746 - protein, 251 aa, Salmonella typhi
MVEDSQETTHFGFQTVAKEQKADMVAHVFHSVASKYDVMNDLMSFGIHRLWKRFTIDCSGVRRGQTVLDLAGGTGDLTAKFSRMVGETGKVILADINDSMLKMGREKLRNIGVIGNVEYVQANAEALPFPDNTFDCITISFGLRNVTEKEKALRSMFRVLKPGGRLLVLEFSKPIIEPLSKAYDAYSFHILPRIGSMVANDADSYRYLAESIRMHPDQDTLKAMMQDAGFESVDYYNLTAGVVALHRGYKF

SEQ ID NO: 13747 - protein, 615 aa, Salmonella typhi
MVNGVNVAQAEVLNLESGAKQVLQETFGYQQFRPGQEAIIDTALSGRDCLVVMPTGGGKSLCYQIPALLLDGLTVVVSPLISLMKDQVDQLLANGVAAACLNSTQSREQQLEVMAGCRTGQIRLLYIAPERLMLDNFLDHLAHWNPVLLAVDEAHCISQWGHDFRPEYAALGQLRQRFPALPFMALTATADDTTRQDIIRLLGLNDPLIQISSFDRPNIRYMLMEKFKPLDQLMRYVQEQRGKSGIIYCNSRAKVEDTAARLQSRGISAAAYHAGLENAIRADVQEKFQRDDLQIVVATVAFGMGINKPNVRFVVHFDIPRNIESYYQETGRAGRDGLPAEAMLFYDPADMAWLRRCLEEKPAGQLQDIERHKLNAMGAFAEAQTCRRLVLLNYFGEGRQEPCGNCDICLDPPKQYDGLNDAQIALSTIGRVNQRFGMGYVVEVIRGANNQRIRDFGHDKLKVYGMGREKSHEHWVSVIRQLIHLGLVMQNIAQHSALQLTDAARPVLRGDVPLKLAVPRIVALKPRVMQKSFGGNYDRKLFAKLRKLRKAIADEENIPPYVVFNDATLIEMAEQMPVSASEMLSVNGVGMRKLERFGKEFMALIRAHVDGDDEE

SEQ ID NO: 13748 - protein, 722 aa, Salmonella typhi
  VARIANT (1)...(722): Xaa = Any Amino Acid
MPMDVSYLLDSLNDKQREAVAAPRSNMLVLAGAGSGKTRVLVHRIAWLLSVENNSPYSIMAVTFTNKAAAEMRHRIGQLMGTSQGGMWVGTFHGLAHRLLRAHHMDANLPQDFQILDSEDQMRLLKRLIXAMNLDEKQWPPRQAMWYINSQKDEGLRPHHIQSYGNPVEQTWQKVYQAYQEACDRAGLVDFAELLLRAHELWLNKPHILQHYRERFTNILVDEFQDTNNIQYAWVRLLAGDTGKVMIVGDDDQSIYGWRGAQVENIQRFLNDFPGAQTIRLEQNYRSTSNILSVANALIENNNGRLGKKLWTDGVDGEPISLYCAFNELDEARFVVNRIKTWQDNGGALAQCAILYRSNAQSRVLEEALLQASMPYRIYGGMRFFERQEIKDALSYLRLIANRNDDAAFERVVNTPTRGIGDRTLDVVRQTSRDRQLTLWQACRELLQEKALAGRAASALQRFMELIDALAQETADMPLHVQTDRVIKDSGLRTMYEQEKGEKGQTRIENLEELVTATRQFSYNDEDEDLMPLQAFLSHAALEAGEGQADTWQDAVQLMTLHSAKGLEFPQVFIVGMEEGMFPSQMSLDEGWRLEEERRLAYVGVTRAMQKLTLTYAETRRLYGKEVYHRPSRFIGELPEECVEEVRLRATVSRPVSHQRMGTPLAENDTGYKLGQRVRHAKFGEGTIVNLEGSGEHSRLQVAFQGQGIKWLVAAYAKLETV

SEQ ID NO: 13749 - protein, 318 aa, Salmonella typhi
  VARIANT (1)...(318): Xaa = Any Amino Acid
MTVTSMLDNXLRIATRQSPLALWQAHYVKDALMATHPGLTVELVPMVTRGDVILDTPLAKVGGKGLFVKELEIALLEKRADIAVHSMKDVPVAFPDGLGLVTICEREDPRDAFVSNKYHSLDDLPAGSIVGTSSLRRQCQLAERRPDLIIRSLRGNVGTRLGKLDNGDYDAIILAVAGLKRLGLESRIRTALPPDVSLPAVGQGAVGIECRLDDARTQALLAPLNHSQTALRVTAERAMNTRLEGGCQVPIGSYAEIINGEIWLRALVGAPDGSVMVRGERRGSPEQAEQMGISLAEELLENGARAILTEVYNGETPA

SEQ ID NO: 13750 - protein, 387 aa, Salmonella typhi
  VARIANT (1)...(387): Xaa = Any Amino Acid
MEQVVIVDAIRTPMGRSKGGAFRNVRAEDLSAHLMRSLLARNPSLTAATLDDIYWGCVQQTLEQGFNIARNAALLAEIPHSVPAVTVNRLCGSSMQALHDAARMIMTGDAQVCLVGGVEHMGHVPMSHGVDFHPGLSRNVAKAAGMMGLTAEMLSRLHGISREMXDQFAARSHARAWAATQSGAXKXEIIXTGXHDADGVLKQFXYDEVIRPETTVEALSTLRPAFDPVSGTVTAGTSSALSDGAAAMLVMSESRARELGLKPRARIRSMAVVGCDPSIMGYGPVPASKLALKKAGLSASDIDVFEMNEAFAAQILPCIKDLGLMEQIDEKINLNGGAIALGHPLGCSGARISTTLINLMERKDAQFGLATMCIGLGQGIATVFERV

SEQ ID NO: 13751 - protein, 349 aa, Salmonella typhi
  VARIANT (1)...(349): Xaa = Any Amino Acid
MSKIRVLSVDDSALMRQIMTEIINSHSDMEMVATAPDPLVARDLIKKFNPDVLTLDVEMPRMDGLDFLXKLMRLRPMPVVMVSXLTGKGSEVTLRALELGAIDFVTKPQLGIREGMLAYSEMIAEKVRTAARARIAAHKPMAAPTTLKAGPLLSSEKLIAIGASTGGTEAIRHVLQPLPLSSPAVIITQHMPPGFTRSFAERLNKLCQISVKEAEDGEXVLPGHAYIAPGDKHMELARSGANYQIKIHDGPPVNRHRPSVDVLFHSVAKHAGRNAVGVILTGMGNDGAAGMLAMYQAGAWTIAQNEASCVVFGMPREAINMGGVSEVVDLSQVSQQMLAKISAGQAIRI

SEQ ID NO: 13752 - protein, 577 aa, Salmonella typhi
MNIQALLSEKVSQAMIAAGAPADCEPQVRQSAKVQFGDYQANGMMAVAKKLGMAPRQLAEQVLTHLDLSGIASKVEIAGPGFINIFLEPAFLAEQVQQALTSDRLGVSQPTRQTIVVDYSAPNVAKEMHVGHLRSTIIGDAAVRTLEFLGHHVIRANHVGDWGTQFGMLIAWLEKQQQENAGDMALADLEGFYRDAKKHYDEDETFAERARNYVVKLQSGDTYFREMWRKLVDITMTQNQITYDRLNVTLTRDDVMGESLYNPMLPGIVADLKAKGLAVESEGATVVFLDEFKNKEGDPMGVIIQKKDGGYLYTTTDIACAKYRYETLHADRVLYYIDSRQHQHLMQAWTIVRKAGYVPDSVPLEHHMFGMMLGKDGKPFKTRTGGTVKLADLLDEALERARRLVAEKNPDMPADELEKLANAVGIGAVKYADLSKNRTTDYIFDWDNMLAFEGNTAPYMQYAYTRVLSVFRKADIDEQALASAPVIISEDREAQLAARLLQFEETLTVVAREGTPHVMCAYLYDVAGLFSGFYEHCPILSAENDAVRNSRLKLAQLTAKTLKLGLDTLGIETVERM

SEQ ID NO: 13753 - protein, 199 aa, Salmonella typhi
MKSAIFRRVIIMLKLNATTTALVVIDLQEGILPFAGGPYTANEVVARAARLAEKCRANGSPVVMVRVGWSDDYAEALKQPVDAATPAHALPENWWTWPTALGKKDSDLEVTKRQWGAFYGTDLELQLRRRGIDTIILCGISTNIGVESTARNAWELGFNLIIAEDACSAASSEQHQSSMTHIFPRIGRVRSVEDILNAL

SEQ ID NO: 13754 - protein, 590 aa, Salmonella typhi
MRTEYCGQLRLSHVGQQVTLCGWVNRRRDLGSLIFIDMRDREGIVQVFFDPDRADALKLASELRNEFCIQVTGTVRARDAKNVNADMATGEIEVLASSLTIINRADSLPLDANHVNTEEARLKYRYLDLRRPEMAQRLKTRAKITSLVRRFMDDHGFLDIETPMLTKATPEGARDYLVPSRVHKGKFYALPQSPQLFKQLLMMSGFDRYYQIVKCFRDEDLRADRQPEFTQIDVETSFMTAPQVREVMEALVRHLWLEVKGVDLGDFPVMTFAEAERRYGSDKPDLRNPMELVDVADLLKSVEFAVFAGPANDPKGRVAALRVPGGAQLSRKQIDDYGNFVKIYGAKGLAYIKVNERAKGLDGINSPVAKFLTADIVEAILERTGAQDGDMIFFGADNKKVVADALGALRLKLGKDLSLTDEDKWAPLWVIDFPMFEDDGEGGLTAMHHPFTAPRDMTASELKTAPEEAVANAYDMVINGYEVGGGSVRIHNGEMQQTVFGILGINEQEQREKFGFLLDALKYGTPPHVGLAFGLDRLTMLLTGTDNIRDVIAFPKTTAAACLMTEAPSFANQAALTELGIQVVKKAENN

SEQ ID NO: 13755 - protein, 480 aa, Salmonella typhi
  VARIANT (1)...(480): Xaa = Any Amino Acid
MSRRLRRTKIVTTLGPATDRDNNLEKVIAAGANVVRMNFSHGSPEDHKMRADKVREIAAKLGRHVAILGDLQGPKIRVSTFKEGKVFLNIGDKFLLDANLGKGEGDKEKVGIDYKGLPADVVPGDILLLDDGRVQLKVLEVQGMKVFTEVTVGGPLSNNKGINKLGGGLSAEALTEKDKADIQTAALIGVDYLAVSFPRCGEDLNYARRLARDAGCDAKIVAKVERAEAVCDQNAMDDIILASDVVMVARGNLGVEIGDPELVGIQKALIRRARQLNRAVITATQMMESMITNPMPTRAEVMDVANAVLDGTDAVMLSAETAAGQYPSETVAAMARVCLGAEKIPSINVSKHRLDVQFDNVEEAIAMSAMYAANHLKGVTAIITMTESGRTALMTSRISSGLPIFAMSRHERTLNLTALYRGVTPVHFDSAADGVVAAHEAVNLLRDXGYLVSGDLVIVXQXDVMSTVGSTNTTRILTVE

SEQ ID NO: 13756 - protein, 491 aa, Salmonella typhi
  VARIANT (1)...(491): Xaa = Any Amino Acid
MAVTXTXQACDLVIFGAKGDLARRKLLPSLYQLEKAGQIHPDTRIIGVGRADWDKEAYTHVVREALETFMKEKIDEGLWDTLSGRLDFCNLDVNDTPAFSRLGDMLDQKNRTTINYFAMPPSTFGAICKGLGEAKLNAKPARVVMEKPLGTSLATSREINDRVGEYFEECQVYRIDHYLGKETVLNLLALRFANSLFVNNWDNRTIDHVEITVAEEVGIEGRWGYFDQAGQMRDMIQNHLLQILCMIAMSPPSDLSADSIRDEKVKVLKSLRRIDRSNVREKTVRGQYTAGFAQGQKVPGYLEXEGANKSSNTETFVAIRVDIDNWRWAGVPFYLRTGKRLPTKCSEVVVYFKTPELNLFKESWQDLPQNKLTIRLQPDEGVDIQVLNKVPRLDHKHNLQITKLDLSYSETFNQTHLADAYERLLLETMRGIQALFVRRDEVEEAWKWVDSITEAWAMDNDAPKPYQAGTWGPVASVAMITRDGRSWNEFE

SEQ ID NO: 13757 - protein, 203 aa, Salmonella typhi
MSAIAPGMILFAYLCGSISSAILVCRIAGLPDPRESGSGNPGATNVLRIGGKGAAVAVLIFDILKGMLPVWGAYALGVTPFWLGLIAIAACLGHIWPVFFGFKGGKGVATAFGAIAPIGWDLTGVMAGTWLLTVLLSGYSSLGAIVSALIAPFYVWWFKPQFTFPVSMLSCLILLRHHDNIQRLWRRQETKIWTKLKKKRQKD

SEQ ID NO: 13758 - protein, 467 aa, Salmonella typhi
  VARIANT (1)...(467): Xaa = Any Amino Acid
MAMWRTILSTDKDNASQFVKNLPRCDIAHKYIAHGXHDIEXQLIVXHDAVDALRHHLHTLSCEHHATSQLLNIYFETPDNCLRRHDMGLRIRGENGRYEMTMIIAGRVTGGLHQRPEYNVALSEPVLDLTQLPAEVWPDGNLPDGLSSSVQPLFSTDFYREKWCLDVDGSRIDIALDLGDVKASEFAEPICELELELLRGDTRAVLTLAKQLLSQTGLRQRSLSKAARGYHLAQGNAPRENTPTAILRTAAKATVEQGLEASLDLALSQWQYHEELWLRGDESAKEHVLDAMGLVRHALMLFGGIVPRKASAHLRDLLTQAEATMTSAVSAVTAVYSTQTAMAKLALTEWLVTKAWQPFLDAKAQAKMAXSFKRXADIHLSRHAAELKKVFGQPLGDKYRDQLPRLTRDIDSVLLLAGYYDAMVAQAWLENWQGLRHAIITGQRIEIEHFRNEAINQQPFWLHSGKR

SEQ ID NO: 13759 - protein, 477 aa, Salmonella typhi
MKVNLPAFERAGVMVVGDVMLDRYWYGPTCRISPEAPVPVVKVNTVEERPGGAANVAMNIASLGANARLVGLTGIDDAARALSKTLAEVNVKCDFVSVPTHPTITKLRVLSRNQQLIRLDFEEGFEGVDPQPLHERINQALGSIGALVLSDYAKGALTSVQTMISLARQAGVPVLIDPKGTDFERYRGATLLTPNLSEFEAVAGKCKSEDELVERGMKLIADYDLSALLVTRSEQGMTLLQPNKAPLHMPTQAQEVYDVTGAGDTVIGVLAATLAAGNTLEEACYFANAAAGVVVGKLGTSTVSPIELENAVRGRADTGFGVMTEEELRQAVASARKRGEKVVMTNGVFDILHAGHVSYLANARKLGDRLIVAVNSDASTKRLKGESRPVNPLEQRMIVLGALESVDWVVSFEEDTPQRLIAGILPDLLVKGGDYKPEEIAGSEEVWANGGEVMVLNFEDGCSTTNIIKKIQTESEK

SEQ ID NO: 13760 - protein, 644 aa, Salmonella typhi
MAKNLILWLVIAVVLMSVFQSFGPSESNGRKVDYSTFLQEVNQDQVREARINGREINVTKKDSNRYTTYIPINDPKLLDNLLTKNVKVVGEPPEEPSLLASIFISWFPMLLLIGVWIFFMRQMQGGGGKGAMSFGKSKARMLTEDQIKTTFADVAGCDEAKEEVAELVEYLREPSRFQKLGGKIPKGVLMVGPPGTGKTLLAKAIAGEAKVPFFTISGSDFVEMFVGVGASRVRDMFEQAKKAAPCIIFIDEIDAVGRQRGAGLGGGHDEREQTLNQMLVEMDGFEGNEGIIVIAATNRPDVLDPALLRPGRFDRQVVVGLPDVRGREQILKVHMRRVPLATDIDAAIIARGTPGFSGADLANLVNEAALFAARGNKRVVSMVEFEKAKDKIMMGAERRSMVMTEAQKESTAYHEAGHAIIGRLVPEHDPVHKVTIIPRGRALGVTFFLPEGDAISASRQKLESQISTLYGGRLAEEIIYGVEHVSTGASNDIKVATNLARNMVTQWGFSEKLGPLLYAEEEGEVFLGRSVAKAKHMSDETARIIDQEVKALIERNYNRARQILTDNMDILHAMKDALMKYETIDAPQIDDLMARREVRPPAGWEDPNGTNNSDSNGTPQAPRPVDEPRTPNPGNTMSEQLGDK

SEQ ID NO: 13761 - protein, 282 aa, Salmonella typhi
  VARIANT (1)...(282): Xaa = Any Amino Acid
MKLFAQGATLDLTHPHVMGILNVTPDSFSDGGAHNTLIEAVKHANLMVNTGATIIDVGGESTRPGAAEVSVEEELDRVIPVLEAIAQRFEVWISVDTSKPEVIREAARAGAHIINDVRSLSEPGALEAAAXTGLPVSLMHMQGNPKTMQEAPKYDDVLPEVNRYFIEQIARCEKAGIAKEKLLLDPGFGFGXNLSHNYTLLARLGEFHHFNLPLLVGMSRKTMVGQLLNVGPSDRLNGSLACAVIAAMQGAQIIRVHDVKETVEAMRVVEATLXAKGNKRYE

SEQ ID NO: 13762 - protein, 445 aa, Salmonella typhi
  VARIANT (1)...(445): Xaa = Any Amino Acid
MSNRKYFGTDGIRGRVGNAPITPDFVLKLGWAAGKVLARHGSRXIIIGKDTRISGYMLESALEAGLAAAGLSASFTXPMPTPAVAXLTRTFRAEAGIVISASHNPFYDNGIKFFSIDGTKLPDDVEEAIEAEMEKEITCVDSAELGKASRIVDAAGRYIEFCKGTFPNELSLNGLKVVVDCAXGATYHIAPNVLRELGATVIAIGCEPNGVNINEEVGATDVRALQARVLAEKADLGIALDGDGDRVIMVDHEGNKVDGDQIMYIIAREGLRQGQLRGGAVGTLMSNMGLELALKQLGIPFARAKVGDRYVLEKLQEKGWRIGAENSGHVILLDKTTTGDGIVAGLQVLAAMVRNHMSLHDLCSGMKMFPQILVNVRYTAGSGDPLENEAVKAVTADVEATLGNRGRVLLRKSGTEPLIRVMVEGEDEAQVTAFAHRIADAVKAV

SEQ ID NO: 13763 - protein, 294 aa, Salmonella typhi
  VARIANT (1)...(294): Xaa = Any Amino Acid
MSHLYDPTTQYYTGEYPKQKQPAPGVQAKMTPVPDCGEKSYVGSGRLKDRKALVTGGDSGIGRAAAIAYAREGTDVAINYLPAEEEDXQQVKALIXECGRKAVLLPGDLSDESXARSLVHXAREALGGLDILALVAGKQTSILETKDLTSEQFQQTFAVNDFDLLRITQEATPLLPXGAXIXXTSSIQXYXPSPHXXDYAATKAAILNYSRGLAKQVAEKGIRVNIVAPGPIWTALQISGGQTQDKIPQFGQQTPMKRAGQPAELAPVYVYLASQESSYVTAEVHGVCGGEHLG

SEQ ID NO: 13764 - protein, 500 aa, Salmonella typhi
MNKEILAVVEAVSNEKALPREKIFEALESALATATKKKYEQEIDVRVEIDRKSGDFDTFRRWLIVEEVTMPTKEITLEAARFEDESLNVGDYVEDQIESVTFDRITTQTAKQVIVQKVREAERAMVVDQFRDQEGEIVTGVVKKVNRDNISLEIKSEGMAGNAEAVILREDMLPRENFRPGDRIRGVLYAVRPEARGAQLFVTRSKPEMLIELFRIEVPEIGEEVIEIKAAARDPGSRAKIAVKTNDKRIDPVGACVGMRGARVQAVSTELGGERIDIVLWDDNPAQFVINAMAPADVASIVVDEDKHTMDIAVEAGNLAQAIGRNGQNVHLASQLSGWELNVMTVDDLQAKHQAEAHAAIEIFTKYLDIDEEFATVLVEEGFSTLEELAYVPMKELLEIDGLDEPTVEALRERAKNALATLAQDQEASLGDNKPADDLLNLEGLDRDMAFKLAARGVCTLEDLADQGIDDLADIEGLTDEKAGELIMAARNICWFGDEA

SEQ ID NO: 13765 - protein, 892 aa, Salmonella typhi
  VARIANT (1)...(892): Xaa = Any Amino Acid
MTDLTLKALAAERQVSVDRLVQQFADAGIRKSADDSVSAQEKQTLLAHLNREAVSGPDKLTLQRKTRSTLNIPGTGGKSKSVQIEVRKKRTFVKRDPQEAERLAAEEQAQREAEEQARREAEEQAKREAQQKAEREAAEQAKREAAEKAKREAAEKDKVSNQQTDDMTKTAQAEKARRENEAAELKRKAEEEARRKLEEEARRVAEEARRMAEENKWTATPEPVEDTSDYHVTTSQHARQAEDENDREVEGGRGRGRNAKAARPAKKGKHAESKADREEARAAVRGGKGGKRKGSSLQQGFQKPAQAVNRDVVIGETITVGELANKMAVKGSQVIKAMMKLGAMATINQVIDQETAQLVAEEMGHKVILRRENELEEAVMSDRDTGAAAEPRAPVVTIMGHVDHGKTSLLDYIRSTKVASGEAGGITQHIGAYHVETDNGMITFLDTPGHAAFTSMRARGAQATDIVVLVVAADDGVMPQTIEAIQHAKAAGVPVVVAVNKIDKPEADPDRVKNELSQYGILPEEWGGESQFVHVSAKAGTGIDELLDAILLQAEVLELKAVRKGMASGAVIESFLDKGRGPVATVLVREGTLHKGDIVLCGFEYGRVRAMRNELGQEVLEAGPSIPVEILGLSGVPAAGDEVTVVRDEKKAREVALYRQGKFREVKLARQQKSKLENMFVNMTEGEVHEVNIVLKADVQGSVEAISDSLLKLSTDEVKVKIIGSGVGGITETDATLAAASNAILVGFNVRADASARKVIESESLDLRYYSVIYNLIXEVKAAXSGMLSPELKQQIIGLAEVRDEFKSPKFGAIAGCMXTEGTIXRHNPIRVXRDNVXIYEGELESLRRFKDDVNEVRNGMECGIGVKNYNDVRVGDMIEVFEIIEIXRTIA

SEQ ID NO: 13766 - protein, 111 aa, Salmonella typhi
  VARIANT (1)...(111): Xaa = Any Amino Acid
MCAEAEFFMYAVFXSGGKQHRVSEGQTVRLEKLDIATGETIEFAEVLMIANGEEVKIGVPFVDGGVIKAEVVAHGRGEKVKIVKFRRRKHYRKQQGHRQWFTDVKITGISA

SEQ ID NO: 13767 - protein, 89 aa, Salmonella typhi
MSLSTEATAKIVSEFGRDANDTGSTDVQVALLTAQINHLQGHFAEHKKDHHSRRGLLRMVSQRRKLLDYLKRKDVARYTALIERLGLRR

SEQ ID NO: 13768 - protein, 721 aa, Salmonella typhi
  VARIANT (1)...(721): Xaa = Any Amino Acid
MPSKIGKDIILLNPIVREFQYGQHTXTLETGMMARQATAAVMVSMDDTAVFVTVVGQKKAKPGQDFFPLTVNYQERTYAAGRIPGSFXRREGRPSEGETLIARLIDRPVRPLFPEGFVNEVQVIATVVSVNPQVNPDIVAMIGASAALSLSGIPFNGPIGAARVGYINDQYVLNPTQDELKESKLDLVVAGTEAAVLMVESEAELLSEDTMLGAVVFGHEQQQVVIQAINDLVKEAGKPRWDWQPEAVNDALNARVAALAESRLSDAYRITDKQERYAQVDVIKSETIEQLIAEDETLDANELGEILHAIEKNVVRSRVLAGEPRIDGREKDMIRGLDVRTGVLPRTHGSALFTRGETQALVTATLGTARDAQVLDELMGERTDSFLFHYNFPPYSVGETGMVGSPKRREIGHGRLAKRGVLAVMPDMDKFPYTVRVVSEITESNGSSSMASVCGASLALMDAGVPIKAAVAGIAMGLVKEGDNYVVLSDILGDEDHLGDMDFKVAGSRDGISALQMDIKIEGITKEIMQVALNQAKGARLHILGVMEQAINAPRGDISEFAPRIHTIKISTDKIKDVIGKGGSVIRALTEETGTTIEIEDDGTVKIAATDGEKAKYAIRRIEEITAEIEVGRIYNSKVTRIVDFGAFVAIGGGKEGLVHISQIADKRVEKVTDYLQMGQEVPVKVLEVDRQGRVRLSIKEATEQSQPAAAPEAPASEQAE

SEQ ID NO: 13769 - protein, 646 aa, Salmonella typhi
MMSYVDWPPLILRHTYYMAEFETTFADLGLKAPILEALTDLGYEKPSPIQAECIPHLLGGRDVLGMAQTGSGKTAAFSLPLLNNLDPELKAPQILVLAPTRELAVQVAEAMTDFSKHMRGVNVVALYGGQRYDVQLRALRQGPQIVVGTPGRLLDHLKRGTLDLSKLSGLVLDEADEMLRMGFIEDVETIMAQIPEGHQTALFSATMPEAIRRITRRFMKEPQEVRIQSSVTTRPDISQSYWTVWGMRKNEALVRFLEAEDFDAAIIFVRTKNATLEVAEALERNGYNSAALNGDMNQALREQTLERLKDGRLDILIATDVAARGLDVERISLVVNYDIPMDSESYVHRIGRTGRAGRAGRALLFVENRERRLLRNIERTMKLTIPEVELPNAELLGKRRLEKFAAKVQQQLESSDLDQYRALLAKIQPSAEGEELDLETLAAALLKMAQGERPLILPPDAPMRPKREFRDRDDRGPRDRNDRGPRGDREERPRRERRDVGDMQLYRIEVGRDDGVEVRHIVGAIANEGDISSRYIGNIKLFASHSTIELPKGMPGEVLQHFTRTRILNKPMNMQLLGDAVPHAGGERRGGGRSFSGERREGGRNFSGERREGGRGDGRRFSGERRESRGPRRDDSTGRRRFGGDA

SEQ ID NO: 13770 - protein, 335 aa, Salmonella typhi
  VARIANT (1)...(335): Xaa = Any Amino Acid
MTDKTIPFXVLDLAPIPEGSSAKEAFTHSLDLARLAEKRGYHRYWLAEHHNMTGIASAATSVLIGYLAANTTTLHLGSGGVMLPNHSPLVIAEQFGTLNTLYPGRIDLGLGRAPGSDQPTMRALRRHMSGDIDNFPRDVAELVDWFDARDPNPHVRPVPGYGEKIPIWLLGSSLYSAQLAAQLGLPFAFASHFTPDMLFQALHLYRTQFKPSARLEKPYAMVCINIIAADSNRDAEFLFTSMQQAFVKLRRGETGQLPPPIENMETFWSPSEQYGVQQALSMSLVGDKAKVRHGLVSILRETQADEIMVNGQIFDHQARLHSFDLAMDVKQELLG

SEQ ID NO: 13771 - protein, 85 aa, Salmonella typhi
  VARIANT (1)...(85): Xaa = Any Amino Acid
MAHKKAGGSTRNGRDSEAKRLGVKRFGGEAVLAGSIIVRQRGTKFHAGTNVGCGRDHTLFAKADGKVKFEVKXPKNRKYISIVAE

SEQ ID NO: 13772 - protein, 287 aa, Salmonella typhi
MKQNESADNSQGQLFIVPTPIGNLADITQRALEVLQAVDLIAAEDTRHTGLLLQHFGINARLFALHDHNEQQKAETLVAKLKEGQNIALVSDAGTPLINDPGYHLVRTCREAGIRVVPLPGPCAAITALSAAGLPSDRFCYEGFLPAKSKGRRDALKAIEAEPRTLIFYESTHRLLDSLEDMVAVWGESRYVVLARELTKTWETIHGAPVGELLAWVKEDENRRKGEMVLIVEGHKAQEDDLPADALRTLALLQAELPLKKAAALAAEIHGVKKNALYKYALAQQEE

SEQ ID NO: 13773 - protein, 347 aa, Salmonella typhi
MKSVVIHAEGDVRVEERPLPQLQAEDDVLVKVVSSGLCGSDIPRIFAQGAHYYPITLGHEFSGYVESYGTGVTDMQPGDAVACVPLLPCFHCPQCERGYFSLCKQYQFVGSRSEGGNAEYVVVKRANLFRLPSDMPIEDGAFIEPITVGLHAFHLAQGCEGKNVIIVGAGTIGLLALQCARELGARSVTAIDINPQKLELAKALGATHTCNSREMTADDIQTALSDIQFDQLVLETAGTPQTVSLAIDITGPRAQLALVGTLHHDLTLTTRTFGLILRKELTLLGSWMNYSAPWPGEEWETAARLLAEKRLQLTPLIAHRGDAESFAEAVKALNGAPMQGKILLQLS

SEQ ID NO: 13774 - protein, 475 aa, Salmonella typhi
  VARIANT (1)...(475): Xaa = Any Amino Acid
MKKIIAVTGCPTGIAHTFMAEEALKNAAKKLSVEIKVETNGASGVENAIQPADLVDIAGVIIAADKDVLPDRFNGLPVIXVPVKEAIHHPAELINKVINGEAPIRKGESTTSTEIIEKESLGRQIYKHLMSGVSNMLPFVVAGGILIAVSLLWGIYSADPNSAEYNATAAMLMKIGQQAFSIMVPVFTAYIAFSISGRPGMVAGFVGGLLANTTGAGFLGGIIAGFAAGYLMLWVKNRLEGLPRQYEGLKSIFIMPLIGVLVIGVLMSLLGQPVAAINNSMMNWLASLQEANPILLGIVVGAMCSFDFGGPVNKAAYVTGTLLLGQGNFYFMAGVSAACITPPLVIALATTFFPKGFSEEERAAGMVNYILGCTHITEGAIPFAAKDPLRVIPMMMIASSISAVLSYSLRIQVPAPHGGFLILPLVSQPLAWVLCILAGSACGAMMLGLWRLWAVRKNSVNTTPVAKAGGQNAAL

SEQ ID NO: 13775 - protein, 254 aa, Salmonella typhi
  VARIANT (1)...(254): Xaa = Any Amino Acid
MFIISSKNMLQKAQHAGYAVPAFNIHNLETLQVVVETAAEMRSPLIVAGTPGTFSYAGMGNIVAIAGDLAREYNLPLAIHLDHHESLADIESKVMAGIRSVMIDGSHFPFEENVALVKSVVDFCHRYDTSVEAELGRLGGIEDDLVVDSKDALYTNPQQAREFVARTGIDSLAVAIGTAHGMYAAEPKLDFERLAEIRALVDIPLVLHGASGLPESDIRQAISLGVCKVNVATGLNIAFSDALKEYFLQNXESQ

SEQ ID NO: 13776 - protein, 256 aa, Salmonella typhi
MNNAIFPNKFKAALAAQQVQIGCWSALASPITTEVLGLAGFDWLVLDGEHAPNDVTTLIPQLMALKGSASAPVVRVPTNEPVIIKRMLDIGFYNFLIPFVETQEEAARAVASTRYPPEGIRGVSVSHRANMFGTVPDYFAQSNKNITIIVQIESQLGVDNVDAIAATEGVDGIFVGPSDLAAALGHLGNASHPDVQQTIQHIFARAKAHGKPCGILAPVEADARRYLEWGATFVAVGSDLGAFRASTQKLADTFKK

SEQ ID NO: 13777 - protein, 132 aa, Salmonella typhi
MADSRQAQGPGKSVLGIGQRIVTIIVEMVETRLRLAVVELEEEKANLFQLLLMVGLTMLFAAFGLMSLMVLVIWAIDPQYRLNAMIATTVVLLVLALIGGIWTLRKARQSTLLRHTRHELANDRQILEDDQS

SEQ ID NO: 13778 - protein, 468 aa, Salmonella typhi
MIHGPLELILNRLPSSASALACSAHALNLIEKRTLNHEEMKALNREVIDYFKEHVNPGFLEYRKSVTAGGDYGAVEWQAGSLNTLVDTQGQEFIDCLGGFGIFNVGHRNPVVVSAVQNQLAKQPLHSQELLDPLRAMLAKTLAALTPGKLKYSFFCNSGTESVEAALKLAKAYQSPRGKFTFIATSGAFHGKSLGALSATAKSTFRRPFMPLLPGFRHVPFGNIDAMSMAFSEGKKTGDEIAAVILEPIQGEGGVILPPQGYLTEVRKLCDEFGALMILDEVQTGMGRTGKMFACEHENVQPDILCLAKALGGGVMPIGATIATEEVFSVLFDNPFLHTTTFGGNPLACAAALATINVLLEQNLPAQAEQKGDTLLDGFRQLAREYPNLVHEARGKGMLMAIEFVDNETGYRFASEMFRQRVLVAGTLNNAKTIRIEPPLTLTIELCEQVLKSARNALAAMQVSVEEV

SEQ ID NO: 13779 - protein, 71 aa, Salmonella typhi
  VARIANT (1)...(71): Xaa = Any Amino Acid
MPVIKVRXNEPFDVALRRFKRSCEKAGXLAEVRRREFYEKPTTERKRXXASAVKRHAKKLARENARRTRLY

SEQ ID NO: 13780 - protein, 337 aa, Salmonella typhi
  VARIANT (1)...(337): Xaa = Any Amino Acid
MRVLGIETSCDETGIAIYDDKKGLLANQLYSQVKLHADYGGVXPELASRDHVRKTVPLIQAALKEAALTASDIDAVAYTAXPGLVGALLVGATVGRSLAFAXNVPAIPVHHMEGHLLAPMLEDNPPDFPFVALLVSGGHTQLISVTGIGQYELLGESIDDAAGEAFDKTAKLLGLDYPGGPMLSKMASQGTAGRFVFPRPMTDRPGLDFSFSGLKTFAANTIRSNGDDEQTRADIARAFEDAVVDTLMIKCKRALESTGFKRLVMAGGVSANRTLRAKLAEMMQKRRGEVFYARPEFCTDNGAMIAYAGMVRFKAGVTADLGVTVRPRWPLAELPAA

SEQ ID NO: 13781 - protein, 433 aa, Salmonella typhi
MHIILTAICGLLNLYAKKFRCPDVLTSIVVVVNLWPDFHRLSQEYLHMTRKQATIAVRSGLNDDEQYGCVVPPIHLSSTYNFTGFNEPRAHDYSRRGNPTRDVVQRALAELEGGAGAVLTNTGMSAIHLVTTVFLKPGDLLVAPHDCYGGSYRLFDSLATRGCYRVRFVDQGDERALQAALEEKPKLVLVESPSNPLLRVVDIAKICRLAREAGAVSVVDNTFLSPALQNPLALGADLVLHSCTKYLNGHSDVVAGVMIAKDPEMVTELAWWANNIGVTGGAFDSYLLLRGLRTLVPRMELAQRNAQAIVKYLQTQPLVKKLYHPSLPNNQGHEIAARQQKGFGAMLSFELDGDEETLRRFLGGLSLFTLAESLGGVESLISHAATMTHAGMSPQARAAAGISETLLRISTGIEDGEDLIADLENGFRAANKG

SEQ ID NO: 13782 - protein, 292 aa, Salmonella typhi
  VARIANT (1)...(292): Xaa = Any Amino Acid
MNNYTIKDITRASGGFAMLAVDQREAMRXMFAAAGAKTPVADSVLTDFKVNAAKILSPYASAVLLDQQFCYRQAVEQNAVAKSCAMIVAADDFIPGNGIPVDNVVIDKKINAQAVKRDGAKALKLLVLWRSDEDAQQRLDMVKEFNELCHSNGLLSIIEPVVRPPRCGDKFDREQAIIDAAKELGDSGADLYKVEMPLYGKGARSDLLTASQRLNGHINMPWVILSSGVDEKLFPRAVRVAMEAGASGFLAGRAVWSSVIGLPDTELMLRDVSAPKLQRLGEIVDEMMAKRR

SEQ ID NO: 13783 - protein, 232 aa, Salmonella typhi
MNKILLVDDDRELTSLLKELLEMEGFNVLVAHDGEQALELLDDSIDLLLLDVMMPKKNGIDTLKALRQTHQTPVIMLTARGNELDRVLGLELGADDYLPKPFNDRELVARIRAILRRSHWSEQQQSSDNGSPTLEVDALSLNPGRQEASFDGQTLELTGTEFTLLYLLAQHLGQVVSREHLSQEVLGKRLTPFDRAIDMHISNLRRKLPERKDGHPWFKTLRGRGYLMVSAS

SEQ ID NO: 13784 - protein, 122 aa, Salmonella typhi
MFDGISLTEHQRQQMRDLMQQARHEQPPVNVSEMETMHRLVTAEKFDESVVRAQAEKMAQEQVARQVEMARVRNQMYRLLTPEQQAVLNEKHQQRMEQLRDVAQWQKSSSLKLLSSSNSRSQ

SEQ ID NO: 13785 - protein, 320 aa, Salmonella typhi
MIKKIGVLTSGGDAPGMNAAIRGVVRAALTEGLEVMGIYDGYLGLYEDRMVQLDRYSVSDMINRGGTFLGSARFPEFRDENIRAVAIENLKKRGIDALVVIGGDGSYMGAKRLTEMGFPCIGLPGTIDNDIKGTDYTIGYFTALGTVVEAIDRLRDTSSSHQRISIVEVMGRYCGDLTLAAAIAGGCEFIVVPEVEFNREDLVAEIKAGIAKGKKHAIVAITEHMCDVDELAHFIEKETGRETRATVLGHIQRGGSPVPYDRILASRMGAYAIDLLLEGHGGRCVGIQNEQLVHHDIIDAIENMKRPFKSDWMECAKKLY

SEQ ID NO: 13786 - protein, 329 aa, Salmonella typhi
MKKWGVGFTLLLASTSILAKDIQLLNVSYDPTRELYEQYNKAFSAHWKQETGDNVVIRQSHGGSGKQATSVINGIEADVVTLALAYDVDAIAERGRIDKNWIKRLPDNSAPYTSTIVFLVRKGNPKQIHDWNDLIKPGVSVITPNPKSSGGARWNYLAAWGYALHHNNNDQAKAQDFVKALFKNVEVLDSGARGSTNTFVERGIGDVLIAWENEALLATNELGKDKFEIVTPSESILAEPTVSVVDKVVEKKGTNAVAEAYLKYLYSPEGQEIAAKNFYRPRDADVAKKYDDAFPKLKLFTIDEVFGGWVKAQKDHFANGGTFDQISKR

SEQ ID NO: 13787 - protein, 255 aa, Salmonella typhi
MRHPLVMGNWKLNGSRHMVNELVANLRKELTGVAGCDVAIAPPEMYIDLAKRAAAGSHIMLGAQNVDLNLSGAFTGETSAEMLKDIGAQYIIIGHSERRTYHKESDELIAKKFAVLKEQGLTPVLCIGETEAENEAGKTEEVCARQIDTVLKTQGAAAFEGAVIAYEPVWAIGTGKSATPAQAQAVHKFIRDHIAKADAKIAEQVIIQYGGSVNASNAAELFAQPDIDGALVGGASLKADAFAVIVKAAEAAKQA

SEQ ID NO: 13788 - protein, 501 aa, Salmonella typhi
  VARIANT (1)...(501): Xaa = Any Amino Acid
MTEKYIVALDQGTTSSRAVVMDHDANIVSVSQREFEQIYPKPGWVEHDPMEIWASQSSTLVEVLAKADISSDQIAAIGITNQRETAIVWERETGKPIYNAIVWQCRRTANICEQLKRDXLEDYIRDNTGLVVDPYFSGTKVKWILDHVEGSRERAKRGELLFGTVDTWLIWKMTQGRVHVTXYTNASRTMLFNIHDLDWDDKMLDVLDIPRAMLPQVRKSSEVYGQTNIGGKGGTRIPIAGIAGDQQAALFGQLCVKEGMAKNTYGTGCFMLMNTGEKAVKSENGLLTTIACGPSGEVNYALEGAVFMAGASIQWLRDEMKLISDAFDSEYFATKVKDTNGVYVVPAFTGLGAPYWDPYARGAIFGLTRGVNSNHIIRATLESIAYQTRDVLEAMQADSGIRLHALRVDGGAVANNFLMQFQSDILGTRVERPEVREVTALGAAYLAGLAVGYWQNLDELQEKAVIEREFRPGIETTERNYRYSGWKKAVKRAMAWEEHDK

SEQ ID NO: 13789 - protein, 469 aa, Salmonella typhi
MSAEHVLTMLNEHEVKFVDLRFTDTKGKEQHVTIPAHQVNAEFFEEGKMFDGSSIGGWKGINESDMVLMPDASTAVIDPFFADSTLIIRCDILEPGTLQGYDRDPRSIAKRAEDYLRATGIADTVLFGPEPEFFLFDDIRFGASISGSHVAIDDIEGAWNSSTKYEGGNKGHRPGVKGGYFPVPPVDSAQDIRSEMCLVMEQMGLVVEAHHHEVATAGQNEVATRFNTMTKKADEIQIYKYVVHNVAHRFGKTATFMPKPMFGDNGSGMHCHMSLAKNGTNLFSGDKYAGLSEQALYYIGGVIKHAKAINALANPTTNSYKRLVPGYEAPVMLAYSARNRSASIRIPVVASPKARRIEVRFPDPAANPYLCFAALLMAGLDGIKNKIHPGEAMDKNLYDLPPEEAKEIPQVAGSLEEALNALDLDREFLKAGGVFTDEAIDAYIALRREEDDRVRMTPHPVEFELYYSV

SEQ ID NO: 13790 - protein, 176 aa, Salmonella typhi
MTTIVSVRRNGHVVIAGDGQATLGNTVMKGNVKKVRRLYNDKVIAGFAGGTADAFTLFELFERKLEMHQGHLVKAAVELAKDWRTDRMLRKLEALLAVADETASLIITGNGDVVQPENDLIAIGSGGPYAQAAARALLENTELGAREIAEKALDIAGDICIYTNHFHTIEELTAKA

SEQ ID NO: 13791 - protein, 607 aa, Salmonella typhi
  VARIANT (1)...(607): Xaa = Any Amino Acid
MIENLRNIAIIAHVDHGKTTLVDKLLQQSGTFDARAETQERVMDSNDLEKERGITILAKNTAIKWNDYRINIVDTPGHADFGGEVERVMSMVDSVLLVVDAFDGPMPQTRFVTKKAFAHGLKPIVVINKVDRPGARPDWVVDQVFDLXVNLDATDEQLDFPIIYASALNGIAGLDHEDMAEDMTPLYQAIVDHVPAPDVDXDGPLQMQISQLDYNNYVGVIGIGRIKRGKVKPNQQVTIIDSEGKTRNAKVGKVLTHLGLERIDSDIAEAGDIIAITGLGELNISDTICDPQNVEALPALSVDEPTVSMFFCVNTSPFCGKEGKFVTSRQILDRLNKELVHNVALRVEETEDADAFRVSGRGELHLSVLIENMRREGFELAVSRPKVIFREIDGRKQEPYENVTLDVEEQHQGSVMQALGERKGDLKNMNPDGKGRVRLDYVIPSRGLIGFRSEFMTMTSGTGLLYSTFSHYDDIRPGEVGQRQNGVLISNGQGKAVAFALFGLQDRGKLFLGHGAEVYEGQIIGIHSRSNDLTVNCLTGKKLTNMRASGTDEAVILVPPIKMSLEQALEFIDDDELVEVTPTSIRIRKRHLTENDRRRANRGQKEE

SEQ ID NO: 13792 - protein, 419 aa, Salmonella typhi
MRMLKREMNIADYDAELWQAMEQEKVRQEEHIELIASENYTSPRVMQAQGSQLTNKYAEGYPGKRYYGGCEYVDVVEQLAIDRAKELFGADYANVQPHSGSQANFAVYTALLQPGDTVLGMNLAQGGHLTHGSPVNFSGKLYNIVPYGIDESGKIDYDEMAKLAKEHKPKMIIGGFSAYSGVVDWAKMREIADSIGAYLFVDMAHVAGLIAAGVYPNPVPHAHVVTTTTHKTLAGPRGGLILAKGGDEELYKKLNSAVFPSAQGGPLMHVIAGKAVALKEAMEPEFKVYQQQVAKNAKAMVEVFLNRGYKVVSGGTENHLFLLDLVDKNLTGKEADAALGRANITVNKNSVPNDPKSPFVTSGIRIGSPAVTRRGFKEAEVKELAGWMCDVLDNINDEATIERVKAKVLDICARFPVYA

SEQ ID NO: 13793 - protein, 396 aa, Salmonella typhi
  VARIANT (1)...(396): Xaa = Any Amino Acid
MKLKVTVRQNISQLFDDLDNGNADLLAAGLVYDSARVKNYQPGPMYYSVSQQLVYRVGQYRPRSLATVNENQLTIAPGHVVVNDLQRLKETKFPDLSWKVDDKKGSTTLLEEVISGKLDYTIADSVAISLFQRVHPELAVALDVTDEQPVTWFSRLDDDNTLSAALLDFFNSINEDGSLARIEEKYLGHGDDFDYVDTRSFLRAVDNVLPELEPLFKKYAKEIDWRLLAAISYXESHWDPLATSPTGVRGLMMLTKNTAQSLGLTDRTDAEQSISGGARYLEDMMAKVPETVPEDERIWFALAAYNMGYAHMLDARSLTVKTKGNPDSWTDVKQRLPLLSQKPYYSKLTYGYARGHEAYAYVENIRKYQISLVGYLQEKEKQEAEAMKLAQDYPAV

SEQ ID NO: 13794 - protein, 455 aa, Salmonella typhi
  VARIANT (1)...(455): Xaa = Any Amino Acid
MCMDKTAALASDILRGIGGEQNILRLENCMTRVRVEVQDDSQLDIPRLKALPGVSGYVKQGEQHQLIVGPGKAAQVVDAMRVQIAAGGVKPDDAMARTKSEAKAKYKAPMSDALRKLANVFIPLIPAFIASGLITGIINILKRPDIVGDVAVHYPNLLGLMGIFGSAVFSIMNILVGVNTAKVFGGSQALGGVMAGILSSPQLAQITLFGEALQPGRGGVIAVLLVVALMCWIERQFRKLLPGSLELILNPLLTTVITGAVAIVALQPLGGWISDAIAHGASWAIDRGGFLVGAVLAGTFLPLVLIGLHQGLVXIHVELVQAHXYNALFPILAMAGVGQIGAAIAVLMKTRNARLKKVIKGALPVGLLGIGEPLIFGVTLPLGKPFIGACLGGAVGGALISYWKVATVITFGISGLPLALTIVAGKVLFYLLGYLIAVIAGFIFTWLLGFNDPEE

SEQ ID NO: 13795 - protein, 297 aa, Salmonella typhi
MNLGTLVSETRNPQTMDLDALSTPELVKRFNEQDTLVAEAVKATLPDVARAVDAAAAALKSGGRIIYMGAGTSGRLGVLDASECPPTFGVPHGLVVGLIAGGPGALLKAVEGAEDSQQAGEDDLVALNLQEQDLVVGLAASGRTPYVIGGLRYARQSGCTTVAVSCNPDSPIAREANIAISPVVGPEALTGSTRLKSGTAQKMVLNMISTGAMVKFGKVYQNLMVDMKATNVKLVDRACRMVVEATGIGREEAETLLKQTDFEVKPAILMALTGLDAAAAREKLAAHQGFLRAALEH

SEQ ID NO: 13796 - protein, 126 aa, Salmonella typhi
MAILGLGTDIVEIARIEAVISRSGERLARRVLSDNEWAIWETHQQPVRFLAKRFAVKEAAAKAFGTGIRNGLAFNQFEVFNDELGKPRLRLWGEALTLAEKLGVAHMHVTLADERHYACATVILES

SEQ ID NO: 13797 - protein, 301 aa, Salmonella typhi
  VARIANT (1)...(301): Xaa = Any Amino Acid
MSTDKTYCGFIAIVGRPNVGKSTLLNKLLGQKISITSRKAQTTRHRIVGIHTEGPYQAIYVDXPGLHMEEKRAINRLMNKAASSSIGDVELVIFVVEGTRWTPDDEMVLNKLRDGKAPVILAVNKVDNVQEKADLLPHLQFLASQMNFLDIVPISAETGMNVDTIASIVRKHLPEAIHHFPEDYITDRSQRFMASEIIREKLMRFLGAELPYSVTVEIERFVTNERGGYDINGLILVEREGQKKMVIGNKGAKIKTIGIEARKDMQEMFEAPVHLELWVKVKSGWADDERALRSLGYVDDL

SEQ ID NO: 13798 - protein, 419 aa, Salmonella typhi
MRPLRKLYNSRPNLREEGDVERFDAVIIGAGAAGMFCAAQAGQAGSRVLLIDNGKKPGRKILMSGGGRCNFTNLYVEPAAYLSQNPHFCKSALARYTQWDFIDLVGRYGIAWHEKTLGQLFCDDSAQRIVDMLVAECDKGGVTMRLRSEVLSVERDESGFVLALNGETVTTQKLVIASGGLSMPGLGASPFGYKIAEQFGLKVLPTRAGLVPFTLHKPLLEQLQTLSGVSVPCVITARNGTVFRENLLFTHRGLSGPAVLQISSYWQPGELVSINLLPDLSLEDVLNEQRNAHPNQSLKNTLAMHLPKRLVECLQQLGLIPDVSLRQLNVRDQQTLVDTLTAWQVQPNGTEGYRTAEVTLGGVDTNELSSRTMEARRVPGLYFIGEVMDVTGWLGGYNFQWAWSSAWACAQDLIALKIN

SEQ ID NO: 13799 - protein, 239 aa, Salmonella typhi
MIEQPDSKSAKPLYKQLEDALKEAIARGEYKPGQQIPTENELSVRWQVSRVTVRKALDALTRENLLTRVSGKGTFVSGEKFQRSMTGIMSFSELCQSQGRRPGSRTIKSVFESVDDETKALLNMNDGEKAVVIERIRYADDVAVSLETVHLPPRFAFLLDEDLNNHSLYECLREKYHLWFTHSRKMIELVYASFEVAHYLGVNEGYPLILIKSEMIDNKGELSCVSQQLIVGDKIRFTV

SEQ ID NO: 13800 - protein, 337 aa, Salmonella typhi
MSTHEATLQQPLLRAIDLKKHYPVKKGIFSPERLVKALDGVSFNLERGKTLAVVGESGCGKSTLGRLLTMVETPTGGELYYQGQDLLKHDPHAQKLRRQKIQIVFQNPYGSLNPRKKVGQILEEPLLINTSLSKEQRREKALAMMAKVGLKTEHYDRYPHMFSGGQRQRIAIARGLMLDPDVVIADEPVSALDVSVRAQVLNLMMDLQQDMGLSYVFISHDLSVVEHIADEVMVMYLGRCVEKGTKEQIFNNPRHPYTQALLSATPRLNPDDRRERIKLTGELPSPLNPPPGCAFNARCRRRFGPCTQLQPQLKEYDGQLVACFAVDQDENPQKPLS

SEQ ID NO: 13801 - protein, 535 aa, Salmonella typhi
  VARIANT (1)...(535): Xaa = Any Amino Acid
MSISLKKSGMLKLGLSLVAMTVAASVQAKTLVYCSEGSPEGFNPQLFTSGTTYDASSVPIYNRLVEFKTGTTEVIPGLAEKWDISEDGKTYTFHLRKGVKWQSSKDFKPTRELNADDVVFSFDRQKNEQNPYHKVSGGSYEYFEGMGLPDLISEVKKVDDHTVQFVLTRPEAPFLADLAMDFASILSKEYADNMLKAGTPEKVDLNPVGTGPFQLVQYQKDSRILYKAFDGYWGTKPKIDRLVFSITPDASVRYAKLQKNECQVMPYPNPADIARMKEDKNINLMEQAGLNVGYLSYNVQKKPLDDVKVRQALTYAVXKEAIIKAVYQGAGVAAKNLIPPTMWGYNXDIKDYGYDPEKAKALLKEAGLEKGFTIDLWAMPVQRPYNPNARRMAEMIQADWAKIGVQAKIVTYEWGEYLKRAKDGEHQTVMMGWTGDNGDPDNFFATLFSCDAAQQGSNYSKWCYKPFEDLIQPARATDDHNKRIELYKQAQVVMHDQAPALIIAHSTVYEPVRKEVKGYVVDPLGKHHFENVSVE

SEQ ID NO: 13802 - protein, 405 aa, Salmonella typhi
  VARIANT (1)...(405): Xaa = Any Amino Acid
MATEQTAITRATFDEVILPVYAPADFIPVKGKGSRVWDQQGKEYIDFAGGIAVTALGHCHPALVEALKSQGETLWHTSNVFTNEPALCLGRKLIDATFAERVLFMNSGTEANXTAFKLARHYACVRHSPFKTKIIAFQNAFHGRSLFTVSVGGQPKYSDGFGPKPADIIHVPFNDLHAVKAVMDDHTCAVVVEPIQGEGGVQAATPEFLKGLRDLCDKHQALLVFDEVQCGMGRTGDLFAYMHYGVTPDILTSAKALGGGFPVSAMLTTQEIASAFHVGSHGSTYGGNPLACAVAGAAFDIINTPEVLQGIHTKRQQFVQHLQAIDEQFDIFSDIRGMGLLIGAELKPKYKGRARDFLYAGAEAGVMVLNAGADVMRFAPSLVVEEADINEGMQRFAQAVGKVVA

SEQ ID NO: 13803 - protein, 847 aa, Salmonella typhi
  VARIANT (1)...(847): Xaa = Any Amino Acid
MSKVRLAIIGNGMVGHRFIEDLLDKSDASLFDITVFCEEPRKAYDRVHLSSYFSHHTAEELSLVREGFYEKHGVKVLVGERAITINRQEKVIHSSAGRTVYYDKLIMATGSYPWIPPIKGSETQDCFVYRTIEDLNAIEACARRSKRGAVVGGGLLGLEAAGALKNLGVETHVIEFAPMLMAEQLDQMGGEQLRRKIESMGVRVHTSKNTQEIVQQGNEARKTMRFADGSELEVDFIVFSTGIRPRDKLATQCGLXVAQRGGIVINDTCQTSDPDIYAIGECASWNNRVYGLVAPGYKMAQVAVDHILGSENAFEGADLSAKLKLLGVDVGGIGDAHGRTPGARSYVYLDESKEVYKRLIVSEDNKTLLGAVLVGDTSDYGNLLQLVLNAIELPENPDSLILPSHASSGKPAIGVDKLPDSAQICSCFDVTKGDLIAAINKGCHTVAALKAETKAGTGCGGCIPLVTQVLNAELAKQGIEVNNNLCEHFAYSRQELFHLIRVEGIKTFEELLTKHGKGYGCEVCKPTVGSLLASCWNEYILKPQHTPLQDTNDNFLANIQKDGTYSVIPRSAGGEITPEGLVAVGRIAREFNLYTKITGSQRIGLFGAQKDDLPEIWRQLIEAGFETGHAYAKALRMAKTCVGSTWCRYGVGDSVGFGVELENRYKGIRTPHKMKFGVSGCTRECAEAQGKDVGIIATEKGWNLYVCGNGGMKPRHADLLAADLDRDTLIKYLDRFMMFYIRTADKLTRTAPWLDNLEGGIEYLKSVIIDDKLGLNEHLEEEMARLRAAVVCEWTETVNTPAAQVRFKHFINSDKRDPNVQVVPEREQHRPATPYERIPVTLVEENA

SEQ ID NO: 13804 - protein, 108 aa, Salmonella typhi
MSQWQNICKIDDILPGTGVCALSGGEQVAIFRPYHSDQVFAISNIDPFFEASVLSRGLIAEHQGELWVASPLKKQRFRLSDGLCMEDEQFSVKHYDARVKDGVVQLRG

SEQ ID NO: 13805 - protein, 457 aa, Salmonella typhi
MDHLPIFCQLRDRDCLIVGGGDVAERKARLLLEAGARLTVNALTFIPQFTVWVNEGMLTLVEGPFDETLLDSCWLAIAATDDDTVNQRVSEAAESRRIFCNVVDAPKAASFIMPSIIDRSPLMVAVSSGGTSPVLARLLREKLESLLPQHLGQVARYAGQLRARVKKQFATMGERRRFWEKFFVNDRLAQSLANADEKAVNATTEHLFSEPLDHRGEVVLVGAGPGDAGLLTLKGLQQIQQADIVVYDRLVSDDIMNLVRRDADRVFVGKRAGYHCVPQEEINQILLREAQKGKRVVRLKGGDPFIFGRGGEELETLCHAGIPFSVVPGITAASGCSAYSGIPLTHRDYAQSVRLVTGHLKTGGELDWENLAAEKQTLVFYMGLNQAATIQEKLIAFGMEANMPVALVENGTSVKQRVVHGVLTQLGELAQQVESPALIIVGRVVALRDKLNWFSNH

SEQ ID NO: 13806 - protein, 334 aa, Salmonella typhi
MTKPIVFSGAQPSGELTIGNYMGALRQWVNMQDDYHCIYCIVDQHAITVRQDAQQLRKATLDTLALYLACGIDPEKSTIFVQSHVPEHAQLGWALNCYTYFGELSRMTQFKDKSARYAENINAGLFDYPVLMAADILLYQTNLVPVGEDQKQHLELSRDIAQRFNGLYGDIFKVPEPFIPKSGARVMSLLEPTKKMSKSDDNRNNVIGLLEDPKSVVKKIKRAVTDSDEPPVVRYDVKEKAGVSNLLDILSAVTGQSIPELEKQFEGKMYGHLKGEVAEAVSGMLSELQERYHRFRNDEAFLQKVMKDGAEKASARAAETLKAVYEAIGFVAKP

SEQ ID NO: 13807 - protein, 133 aa, Salmonella typhi
MKEKSSVEVRLDKWLWAARFYKTRALAREMIEGGKVHYNGQRSKPSKIVELNATLTLRQGNDERTVIVKAITEQRRPASEAVALYEETAESVEKREKMAQARKLNALTMPHPARRPDKKERRDLLRFKHGDSE

SEQ ID NO: 13808 - protein, 294 aa, Salmonella typhi
MIMPQHDQLHRYLFENFAVRGELVTVSETLQQILDNHNYPQSVKTVLAELLVATSLLTATLKFAGDITVQLQGDGPLSLAVINGNNQQQMRGVARVQGDIPDNADLKTLVGNGYLVITITPEEGERYQGVVGLEGDTLAACLEDYFLRSEQLPTRLFIRTGDVDGKPAAGGMLLQVMPAQNAQAEDFDHLAMLTETIKSEELLTLPANDVLWRLYHEEEVTLYDPQEVEFKCTCSRERCAGALKTLPDEEVDSILAEEGEIDMHCDYCGNHYLFNAMDIAEIRNNASPADPQVH

SEQ ID NO: 13809 - protein, 539 aa, Salmonella typhi
  VARIANT (1)...(539): Xaa = Any Amino Acid
MRVNNLTPQDLKAYGINDVQDIVYNPSYDTLYQEELNPGLEGYERGVLTNLGAVAVDTGIFTGRSPKDKYIVRDDTTRDTLWWSDKGKGKNDNKPLSQETWQHLKGLVTHQLSGKRLFIVDAFCGANADTRLSVRFITEVAWQAHFVKNMFIRPTDEELVGFKPDFIVMNGAKCTNPQWKEQGLNSENFVAFNLTERIQLIGGTWYGGEMKKGMFSVMNYLLPLKGIASMHCSANVGEKGDVAVFFGLSGSGKTTLSTDPKRRLIGDDEHGWDDDGVFNXEGGCYAKTIKLSKEAEPEIYHAIRRDALLENVTVREDGTVDFDDGSKTENTRVSYPIYHIDNIVKPVSKAGHATKVIFLTADAFGVLPPVSRLTANQTQYHFLSGFTAKLAGTERGVTEPTPTFSACFGAAFLTLHPTQYAEVLVKRMQAAGAQAYLVNTGWNGTGKRISIKDTRAIIDAILNGSLDNAETFRLPLFDLAIPTELPGVDTHILDPRNTYASPEQWQEKATALAKLFIENFEKYTDTPAGEALVSAGPKL

SEQ ID NO: 13810 - protein, 450 aa, Salmonella typhi
MRRMRFSPRSSFARTLLLIVTLLFVSLVTTYLVVLNFAILPSLQQFNKVLAYEVRMLMTDKLQLEDGTQLVVPPAFRREIYRELGISLYTNEAAEEAGLRWAQHYEFLSHQMAQQLGGPTEVRVEVNKSSPVVWLKTWLSPNIWVRVPLTEIHQGDFSPLFRYTLAIMLLAIGGAWLFIRIQNRPLVDLEHAALQVGKGIIPPPLREYGASEVRSVTRAFNHMAAGVKQLADDRTLLMAGVSHDLRTPLTRIRLATEMMGEEDGYLAESINKDIEECNAIIEQFIDYLRTGQEMPMEMADLNSVLGEVIAAESGYEREINTALQAGSIQVKMHPLSIKRAVANMVVNAARYGNCWIKVSSGTESHRAWFQVEDDGPGIKPEQRKHLFQPFVRGDSARSTSGTGLGLAIVQRIIDNHNGMLEIGTSERGGLSIRAWLPVPVARVQGTTKEA

SEQ ID NO: 13811 - protein, 776 aa, Salmonella typhi
MMNDSFCRIIAGEIQANAGQVEAAVRLLDEGNTVPFIARYRKEITGGLDDTQLRNLETRLGYLRELEDRRQAILKSISEQGKLTDELAGAINATLSKTELEDLYLPYKPKRRTRGQIAIEAGLEPLADLLWNEPSHDPDVKAAKYIDGDKGVADTKAALDGARYILMERFAEDAALLAKVRDYLWKNAHLVATVVSGKEEEGAKFRDYFDHHEPIANVPSHRALAMFRGRNEGILQLSLNADPQFDEPPKESYCEQIIMDHLGLRLNNAPADSWRKGVVSWTWRIKVLMHLETELMGTVRERAEDEAINVFARNLHDLLMAAPAGLRATMGLDPGLRTGVKVAVVDGTGKLVATDTIYPHTGQAAKAATVIAALCEKYHVELVAIGNGTASRETERFYLDVQKQFPNVTAQKVIVSEAGASVYSASELAAQEFPDLDVSLRGAVSIARRLQDPLAELVKIDPKSIGVGQYQHDVSQTQLARKLDAVVEDCVNAVGVDLNTASVPLLTRVAGLTRMMAQNIVAWRDENGQFQNRQQLLKVSRLGPKAFEQCAGFLRINHGDNPLDASTVHPEAYPVVERILAATQQALKDLMGNSNELRHLKAADFTDDKFGVPTVSDIIKELEKPGRDPRPEFKTAQFADGVETMNDLLPGMILEGAVTNVTNFGAFVDIGVHQDGLVHISSLSTKFVDDPHTVVKAGDIVKVKVLEVDLQRKRIALTMRLDEQPGETAARRGGGADRAQGNRPASKAAKPRGRDAQPAGNSAMMDALAAAMGKKR

SEQ ID NO: 13812 - protein, 654 aa, Salmonella typhi
MTQLAIGEATPHGATYDGHGVNFTLFSAHAERVELCVFDSRGNERRYDLPGRRGDVWHGYLAGARPGLRYGYRVHGPWQPAQGHRFNPAKLLLDPYARQVEGELKDHPLLHGGHDEPDYRDNAAVAPKSVVISDHYDWEDDAAPRTPWGKTVIYEAHVKGLTYLHPELPQEIRGTYKALGHPVMVAYFKQLGITALELLPVAQFASEPRLQRMGLTNYWGYNPMAMFALHPAWASSPETALDEFRDAVKALHRAGIEVILDIVLNHSAELDLDGPTFSLRGIDNRSYYWIRDDGDYHNWTGCGNTLNLSHPGVVEYACECLRYWMETCHVDGFRFDLASVMGRTPTFRQDAPLFAAIKACPVLSTVKLIAEPWDIGEGGYQVGNFPPPFAEWNDHFRDAARRFWLPRNLTTGEFACRFAASSDVFKRNGRAPGASVNLLTAHDGFTLRDCVCFNQKHNEANGEENRDGTNSNYSDNHGKEGLGGPLDLMERRRDSIHALLATLLLSQGTPMLLAGDEHGHSQHGNNNAYCQDNALTWLDWQQANRGLTTFTAALIRLRQQIPALTGNSWWEEGDGNVRWLNKNAQPLSADEWQNGPKLMQILLSDRFLIAINATLEVTDIVLPEGEWRAVPPFAGEDNPVITAVWQGLCVFQRG

SEQ ID NO: 13813 - protein, 430 aa, Salmonella typhi
  VARIANT (1)...(430): Xaa = Any Amino Acid
MKPMHIAMALFSAAMFFVLAGVFMGVQLELDGTKLVVDTAADIRWQWIFIGTAVVXFFQLLRXMFQKAVXHVTGPKFILPAIDGSTVKQKLFLMALLVIAVAWPXMVSRGXVDIATMXMIYIILGLGLNVVVGLSGLLVLGYGGFYAIGAYTFALLNHYYGLGFWTCLPLAGLVSAAAGFLLGFPVLRLRGDYLAIVTLGFGEIVRILLLNNTEITGGPNGISQIPKPTLFGLEFSRNTREGGWDTFSNFFGVKYDPSDRVIFLYLVALLLVVLSLFVINRLLRMPLGRAWEALREDEIACRSLGLSPTRIKLTAFTISAAFAGFAGTLFAARQGFVSPESFTFAESAFVLAIVVLGGMGSQFAVILAAVLLVVSRELMRDFNEYSMLMLGGLMVLMMIWRPQGLLPMTRPQLKLKSGQAKGEQAXVSHY

SEQ ID NO: 13814 - protein, 635 aa, Salmonella typhi
MIVFSSLQIRRGVRVLLDNASATINPGQKVGLVGKNGCGKSTLLALLKNEISADAGSFTLPGTWQLAWVNQETPALPQPAIEYVIDGDREYRHLEAQLNDANERNDGHAIASIHGKLDAIDAWTVRSRAASLLHGLGFSNDQLERPVSDFSGGWRMRLNLAQALICRSDLLLLDEPTNHLDLDAVIWLEKWLKSYPGTLILISHDRDFLDPIVDKIIHIEQQTLFEYTGNYSAFEVQRATRLAQQQAMYESQQERVAHLQSYIDRFRAKATKAKQAQSRIKMLERMELIAPAHVDNPFHFSFRAPESLPNPLLKMEKVSAGYGDRIILESIKLNLVPGSRIGLLGRNGAGKSTLIKLLAGELEPLHGEIGLAKGIKLGYFAQHQLEFLRADESPLQHMARLAPQELEQKLRDYLGGFGFQGDKVTEETQRFSGGEKARLVLALIVWQRPNLLLLDEPTNHLDLDMRQALTEALIDFEGALVVVSHDRHLIRSTTDDLYLVHDKKVEPFDGDLEDYQQWLSDVQKQENQADDAPKENNANSAQSRKDQKRREAELRTLTQPLRKEITRLEKEMEKLNAQLAQAEEKLGDSSLYDPSRKAEMTECLQLQASAKSGLEECEMAWLEAQEQLEQMMQND

SEQ ID NO: 13815 - protein, 302 aa, Salmonella typhi
  VARIANT (1)...(302): Xaa = Any Amino Acid
MFAAIIIGIFIISVIYAHSRGVEKQKLSRQLFDHSTFMAPINMFMTRFSTLPAKQPYFDTTAFPELQKLTENWQVIREEALRLQHHIKAAQANNDAGFNTFFKRGWKRFYLKWYSDAHPSAETLCPITTKLVNSIPSIKAAMFAELPPGAYLGKHRDPYAGSVRYHLGLSTPNDDRCFIEVDRQRHSWRDGEAVIFDETYVHWAENKTEQTRIIXFCDIERPMKWRWAQSVNHWVGASLMSAASSPNDENDRTGAINRIFKYVHAARDAGQRLKKKNRTLYYALKYLVIAAIFAAIILFSLL

SEQ ID NO: 13816 - protein, 652 aa, Salmonella typhi
  VARIANT (1)...(652): Xaa = Any Amino Acid
MSQTHKHAIPANIADRCLINPEQYETKYKQSINDPDTFWGEQGKILDWITPYQKVKNTSFAPGNVSIKWYEDGTLNLAANCLDRHLQENGDRTAIIWEGDDASQSKHISYRELHRDVCRFANTLLDLGIKKGDVVAIYMPMVPEAAVAMLACARIGAVHSVIFGGFSPEAIAGRIIDSSSRLVITADEGVRAGRSIPLKKNVDDALKNPNVTSVEHVIVLKRTGNDIDWQEGRDLWWRDLIEKASPEHQPEAMNAEDPLFILYTSGSTGKPKGVLHTTGGYLVYAATTFKYVFDYHPGDIYWCTADVGWVTGHSYLLYGPLACGATTLMFEGVPNWPTPARMCQVVDKHQVNILYTAPTAIRALMAEGDKAIEGTDRSSLRILGSVGEPINPEAWEWYWKKIGKEKCPVVDTWWQTETGGFMITPLPGAIELKAGSATRPFFGVQPALVDNEGHPQEGATEGNLVITDSWPGQARTLFGDHERFEQTYFSTFKNMYFSGDGARRDEDGYYWITGRVDDVLNVSGHRLGTAEIESALVAHPKIAEAAVVXIPHAIKGQAIYAYVTLNHGEEPSPELYAEVRNWVRKEIGPLATPDVLHWTDSLPKTRSGKIMRRILRKIAAGDTSNLGDTSTLADPGVVEKLLEEKQAIAMPS

SEQ ID NO: 13817 - protein, 217 aa, Salmonella typhi
  VARIANT (1)...(217): Xaa = Any Amino Acid
MQQYEVRASDLEPASQLLKCYVEMVHSRVYTIYETYSGDSIMASRGVNKVILVGNLGQDPEVRYMPSGGAVANLTLATSESWRDKQTGEMKEQTEWHRVVMFGKLAEVAGEYLRKGSQVYIXGXXRTRKWTDQSGQERYTTEINVPQIGGVMQMLGGRQGGGAXXXXQQQXGWGQPQQPQQPQGGNQFSGGAQSRPQQSAPAPSNEPPMDFDDDIPF

SEQ ID NO: 13818 - protein, 941 aa, Salmonella typhi
  VARIANT (1)...(941): Xaa = Any Amino Acid
MDKIEVRGARTHNLKNINLVIPRDKLIVVXGLSGSGKSSLAFDTLYAEGQRRYVESLSAYARQFLSLMEKPDVDHIEGLSPAISIEQKSTSHNPRSTVGTITEIHDYLRLLFARVGEPRCPDHDVPLAAQTVSQMVDNVLSQPEGKRLMLLAPIIKERKGEHTKTLENLASQGYIRARIDGEVCDLSDPPKLELQKXHTIEVVIDRFKVRNDLSQRLAESFETALELSGGTAVVADMDDEKAEELLFSANFXCPICGYSMRELEPRLFSFNNPAGACPTCDGLGVQQYFDPDRVIQNPDLSLAGGAIRGWDRRNXYYFQMLKSLAEHYKFDVDAPWASLSANVHKVVLYGSGKENIEFKYMNDRGDTSVRRHPFEGVLHNMERRYKETESSAVREELAKFISNRPCASCEGTRLNREARHVFVENTPLPAISDMSIGHAMDFFTNLKLSGQRAKIAEKVLKEIGDRLKFLVNVGLNYLTLSRSAETLSGGEAQRIRLASQIGAGLVGVMYVLDEPSIGLHQRDNERLLGTLIHLRNLGNTVIVVEHDEDAIRAADHVIDIGPGAGVHGGEVVAEGPLEAIMAVPESLTGQYMSGKRKIEVPKQRVPANPEKVLKLTGARGNNLKDVTLTLPVGLFTCITGVSGSGKSTLINDTLFPIAQRQLNGATIAEPAPYRDIQGLEHFDKVIDIDQSPIGRTPRSNPATYTGVFTPVRELFAGVPESRSRGYTPGRFSFNVRGGRCEACQGDGVIKVEMHFLXDIYVPCDQCKGKRYNRETLEIKYKGKTIHEVLDMTIEEAREFFDAVPALARKLQTLMDVGLTYIRLGQSATTLSGGEAQRVKLARELSKRGTGQTLYILDEPTTGLHFADIQQLLDVLHQLRDQGNTIVVIEHNLDVIKTADWIVDLGPEGGSGGGEILVAGTPETVAECEASHTARFLKPMLK

SEQ ID NO: 13819 - protein, 178 aa, Salmonella typhi
MASKGVNKVILVGNLGQDPEVRYMPNGGAVVNLSLATSDTWTDKQTGDKKERTEWHRVVLYGKLAEIASEYLRKGSQVYIEGALRTRKWTDQSGVEKYTTEVVVSQSGTMQMLGGRNSAGSGQQQGGWGQPQQPAAPSHSGMPPQQHPANEPPMDFDDDIPFAPFGHSVARHALYVLS

SEQ ID NO: 13820 - protein, 664 aa, Salmonella typhi
  VARIANT (1)...(664): Xaa = Any Amino Acid
MRLVLCEKPSQGRDIAKFLGATQRGEGFLNGPGVTVTWARGHLLETAEPEVYGEQYGKPWRTDVLPLLPQQWKLVVKADAKAQFAVINRLLKQVDEVVIATDADREGEVIARELLDYCKFQGRVFRLWMSALDDASIRSALADLWPSSRTESLYYAGVGRSRADWLIGMNLTRLFTLLGREAGIGNVLSVXRVQTPTLAIVVKRDREIDNFVSKPYFEVIATMAVNGVLFPSKWVPAAQYCDEEKRCIQSGVAAQVVQLCRQTPTAAIINCQIERKKQSAPLAFSLSTLQQACSRHWGMPAQTVLDIAQKLYETHKLTTYPRTDCGYLPLSMREEIPQVLSAVVGTDPALQPVVASLDTQFVSRIWNDKKITAHHGIIPTKHTGDLSKLSDAERNVYQLVRLHYLAQFLPQMEIDVTEATFNIGGQLFRTRGNVLVKPGWKSLFGKMSEDDEDNTGETTLPAMQAGQVCQVQGAEQKVLQTKPPAPYNDGTLIAAMTNAAAFVTDAALKKVLKENAGIGTEATRAGIIDTLLKRGFLVREKKTLKSTPLGRNLVDVLPGTLTNPGLTALWEQMLDEVAAGRVSLDDFMAKQSQWVSQLVAQGRSQPLTMQAPPSPPCPVCGGKTLQRNGKSGLFWGCLKYPECKGIVNNGNKGPRGRRRKPSPA

SEQ ID NO: 13821 - protein, 476 aa, Salmonella typhi
  VARIANT (1)...(476): Xaa = Any Amino Acid
MTVKNDSIQSTFLFHDYETFGTHPALDRPAQFAALRTDNDFNVIGEPEVFYCKPADDYLPQPGAVLITGITPQEAREKGENEAAFARRIHALFTVPKTCVVGYNNVRFDDEVTRNIFYRNFYDPYAWSWQHDNSRWDLLDVMRACYALRPEGINWPENDDGLPSFRLEHLTQANGIEHSNAHDAMADVYATIAMAQLVKTRQPRLFDYLYSHRSKHKLAALIDVPQMKPLVHVSGMFGAWRGNTSWVAPLAWHPENRNAVIMVDLAGDISPLLELXSDTXRERXYTAKADLXDHAXVPVXLVHINXCPVLAQANXLRPEDADRLGINRQHCLDNLKVLRENPQVRDKVVAIFAEAEPFATSDNVDAQLYDGFFSDADRAAMKIVLETEPRNLPALDITFVDKRIEKLLFNYRARNFPGTLDDAEQQRWLEHRRQVLTPEFLQQYANELQMLSQQYAEDKTKLGLLKSLWQYATEIV

SEQ ID NO: 13822 - protein, 468 aa, Salmonella typhi
MSKQQIGVVGMAVMGRNLALNIESRGYTVSVFNRSREKTEEVIAENPGKKLVPYYTVKEFVESLETPRRILLMVKAGAGTDAAIDSLKPYLEKGDIIIDGGNTFFQDTIRRNRELSAEGFNFIGTGVSGGEEGALKGPSIMPGGQKDAYELVAPILTKIAAVAEDGEPCVTYIGADGAGHYVKMVHNGIEYGDMQLIAEAYSLLKGGLNLSNEELANTFTEWNNGELSSYLIDITKDIFTKKDEDGNYLIDVILDEAANKGTGKWTSQSALDLGEPLSLITESVFARYISSLKAQRVAASKVLSGPKAQPAGDKAEFIEKVRRALYLGKIVSYAQGFSQLRAASDEYHWELNYGEIAKIFRAGCIIRAQFLQKITDAYAENAGIANLLLAPYFKKIADEYQQALRDVVAYAVQNGIPVPTFSAAVAYYDSYRAAVLPANLIQAQRDYFGAHTYKRTDKEGIFHTEWLE

SEQ ID NO: 13823 - protein, 464 aa, Salmonella typhi
  VARIANT (1)...(464): Xaa = Any Amino Acid
MTNLKKRERAKTNASLISMVQRFSDITIMFGGLWFICEVSGLPFLYMHLLVALITLVVFQMLGGMTDFYRSXRGVXMSTELTLLLQNWTLSLIFSAGLVAXNDDFDNRLATWLAWYALSSLSLVLCRPSIRFGAGWLRNRGYHTRRGAVAGDXPAGHALLDSFRNEPWLGXXVXGVYHDPKPGGVSADWAGNFEQLIDDAKASRIHNVYIAMSMSDGAMVKKLVRELADTTCSVILIPDVFTFNILHSRVEEMSGVPVVPLYDTPLSGINRLLKRAEDIVLASLILLLISPVLCCIAPAVKLSSPGPVIFRQTRYGMDGKPSKVWRFRSMKVMENDKVVTQATQNDPRVTRVGNFLRRTSLDELPQFINVLTGGMSIVGPRPHAVAHNEQYRQLIEGYMLRHKMKPGITGWAQINGWRGETDTLEKMEKRVEFDLEYIREWSIWFDIKIVFLTIFKGFVNKAAY

SEQ ID NO: 13824 - protein, 269 aa, Salmonella typhi
MTIRIKAMGFLSGKRILVTGVASKLSIAYGIAQAMHREGAELAFTYQNDKLKGRVEEFAAQLGSSIVLPCDVAEDASIDAMFAELGNVWPKFDGFVHSIGFAPGDQLDGDYVNAVTREGFKIAHDISSYSFVAMAKACRTMLNPGSALLTLSYLGAERAIPNYNVMGLAKASLEANVRYMANAMGPEGVRVNAISAGPIRTLAASGIKDFRKMLAHCEAVTPIRRTVTIEDVGNSAAFLCSDLSAGISGEVVHVDGGFSIAAMNELELK

SEQ ID NO: 13825 - protein, 289 aa, Salmonella typhi
MEYSILSNNLKMPMVGFGVFKVTDKEECQQSVLSAIRSGYRLIDTAAVYGNEDAVGDAVREAIATGLCTREELFITSKLWVQDMANYDLAKAGIEASLKKSGLDYFDLYLLHQAMGDYFSAWRALEDAYEAGKLKAIGVSNFYAHVLANFCETVRITPMVNQVELHPYFAQPAALETMKHYNVQPEAWAPLGGGRHKPYENVMLQRIADAHQKTIAQVVLRWNVQRGVTVIPKSTRQERIEENFAIWDFSLTDNEMAQINALDLGYVGEAVKHFNPEFVRGCLGVKIHD

SEQ ID NO: 13826 - protein, 1148 aa, Salmonella typhi
MPEKQRYTLPTKAGDQRQLGELTGAACATLVAEIAERHAGPVVLIAPDMQNALRLHDEIRQFTDQMVMNLADWETLPYDSFSPHQEIISSRLSTLYQLPSMQRGVLIVPVNTLMQRVCQHSYLHGHALVMKKGQRLSRDALRAQLDSAGYRHVDQVMEHGEYATRGALLDLFPMGSEQPYRLDFFDDEIDSLRLFDADTQRTLEEVEAINLLPAHEFPTDKAAIELFRSQWRDTFEVKRDAEHIYQQVSKGTLPAGIEYWQPLFFSEPLPPLFSYFPANTLVVNTGSLETSAERFQADTLARFENRGVDPMRPLLPPEALWLRVDGLFSELKRWPRLQLKTDHLPEKAANTNLGFQKLPDLAIQAQQKAPLDALRKFLESFSGPVIFSVESEGRREALGELLARIKIAPKRILRLDEAQDAGRYLMIGAAEHGFIDTQRNLALICESDLLGERVARRRLDSRRTINPDTLIRNLAELHVGQPVVHLEHGVGRYAGMTTLEAGGIKGEYLMLTYANDAKLYVPVSSLHLISRYAGGAEESAPLHKLGGDAWSRARQKAAEKVRDVAAELLDIYAQRAAKEGFAFKHDREQYQLFCDSFPFETTPDQAQAINAVLSDMCQPLAMDRLVCGDVGFGKTEVAMRAAFLAVENHKQVAVLVPTTLLAQQHYDNFRDRFANWPVRIEMLSRFRSAKEQTQILAEAAEGKIDILIGTHKLLQSDVKLRDLGLLIVDEEHRFGVRHKERIKAMRADVDILTLTATPIPRTLNMAMSGMRDLSIIATPPARRLAVKTFVREYDSLVVREAILREILRGGQVYYLYNDVENIQKAAERLAELVPEARIAIGHGQMRERELERVMNDFHHQRFNVLVCTTIIETGIDIPTANTIIIERADHFGLAQLHQLRGRVGRSHHQAYAWLLTPHPKAMTADAQKRLEAIASLEDLGAGFALATHDLEIRGAGELLGEEQSGSMETIGFSLYMELLENAVDALKAGREPSLEDLTSQQTEVELRMPSLLPDDFIPDVNTRLSFYKRIASAKNENELEEIKVELIDRFGLLPDPARNLLDIARLRQQAQKLGIRKLEGNEKGGTIEFAEKNHVDPAWLIGLLQKQPQHFRLDGPTRLKFIQDLSERKTRIDWVRQFMQQLEENAIA

SEQ ID NO: 13827 - protein, 233 aa, Salmonella typhi
  VARIANT (1)...(233): Xaa = Any Amino Acid
MNKILLQCDNLCKRYQEGTVQTDVLHDVSFSIGEGEMMAIVGSSGSGKSTLLHLLGGLDTPTSGDVIFSGQPMSKLSSAAKAELRNQKLGFIYQFHHLLPDFTALENVAMPLLIGKKKPAEIDARAREMLHAVGLEHRATHRPSELSGGERQRVAIARALVNNPRLVLADEPTGNLDARNADSIFELLGELNRLQGTAFLVVTHDLQLAKRMSXQLEMRDGRLTAELSLMGAE

SEQ ID NO: 13828 - protein, 401 aa, Salmonella typhi
MMKTHHLIRVVASLAMLATSGLAYAEEYKASTDEKAIKMTNVASLEARVQARMEKGAFGYIRGGAEDENNLRSNTESFDKKYIMPRVLQGIELKEIDLSTQLLGIPLKTPIIQAPMAAQGLAHASGELATAKGMAQVGSIFSLSTYGNKTIEEVANVSGKNPFFFQLYMSKNNQFNEFILAQAVKHGAKAIILTVDSPVGGYREEDIKNNFQFPLSFANLEMFARKNDDGSKTGKGAGISEIYAQAKQAFTPEDIAYVHRISGLPVIVKGIQSPEDAEIAIQAGAAGIWVSNHGGRQLDSGPSSFDMLPAIAKVVNKRVPVIFDSGVRRGSHVFKALASGADIVAVGRPVLYGLNLGGAQGVASVIEQLNKELTINMMLGGARNIEQVKTTRLLTEKDLPQ

SEQ ID NO: 13829 - protein, 481 aa, Salmonella typhi
  VARIANT (1)...(481): Xaa = Any Amino Acid
MTIWENAMQYQLLINGVLVDGEGERQSVYNPATGEVILEIAEASPVQVDAAVLAADSAFAEWGQTTPKARAECLLKLADSIEQNALEFARLESQNCGKPLHCVINDEIPAIVDVFRFFAGAARCLSGLAAGEYLEGHTSMIRRDPIGVVASIAPWNYPLMMAAWKLAPALAAGNCVVIKPSEITPLTALKLAALAKDIFPPGVLNVLFGRGQTVGDVLTGHEKVRMVSLTGSIATGEHILRHTAPAIKRTHMELGGKAPVIVFDDADLDAVAQGVRTFGFYNAGQDCTAACRIYAQRGIYDALVEKLGNAVSSLKMGAPEDKSTELGPLSSLAHLKRVTAAVEEAKALSHIRVITGGSQTEGKGYYFAPTLLADAKQEDAIVQREVFGPVVSITVFDDEDQVLRWANDSRYGLASSVWTQDVXRAHRLSARLQYGCTWINTHFMLVSEMPHGGQKQSGYGKDMSLYGLEDYTLVRHIMVKH

SEQ ID NO: 13830 - protein, 355 aa, Salmonella typhi
MDYARHEENRMKQQTNRNRRWVLASRPHGAPQMDNFRLEEDDVATPGEGQVLLRTVFLSLDPYMRGRMSDEPSYAPPVEPGCVMVGGTVSRVVASNHPDYRPDEWVLSYNGWQDYDISDGEGLVKLGDNPQHPSWSLGVLGMPGFTAYMGLLDIGQPKEGETLVVAAATGPVGATVGQIGKLKGCRVVGIAGGAEKCRHATDVLGFDLCLDHHADNFPQQLAQACPQGIDIYYENVGGKVFDAVLPLLNTSARIPLCGLVSGYNATTLPDGPDRLPLLMATLLKKRIRLQGFIINQDYGHRIHEFQQEMGRWIKEGKIHYREQITDGLENAPEAFIGLLAGKNFGKVVIRLADDA

SEQ ID NO: 13831 - protein, 466 aa, Salmonella typhi
MRGKMTRQNENYNRYLLSDWRPENPAFWENKGKGIARRNLWISVSCLLLAFCVWMLFSAVAVNLNKIGFDFTTDQLFLLTALPSLSGAILRVPYSFMVPLFGGRKWTVLSTVILIIPCAWLGFAVQNPATPFGVFILIALLCGFAGANFASSMGNISFFFPKARQGSALGINDGLGNLGVSVMQLIAPLVIFLPIFTFLGVRGVPQPDGSLLALTNAAWIWVPLLAVATLAAWFGMNDIGSSKASVASQLPVLKRLHLWLLSLLYLATFGSFIGFSAGFAMLAKTQFPDVNILQLAFFGPFIGALARSAGGVISDKFGGVRVTLINFIFMALFTALLFLTLPGSGAGSFSAFYLVFMGLFLTAGLGSGSTFQMIAVIFRQITLYNVKLRGGSDEQAQREAVTDTAAALGFISAIGAVGGFFIPKAFGTSLALTGSPVGAMKIFLLFYIACVLLTWLVYGRLKPKQQ

SEQ ID NO: 13832 - protein, 336 aa, Salmonella typhi
MKAAVVTQDHQVDVTEKTLRPLRHGEALLKMECCGVCHTDLHVKNGDFGDKTGVILGHEGIGVVAEVGPGVTSLKPGDRASVAWFYEGCGHCEYCNTGNETLCRNVKNAGYTVDGGMAEECIVVADYAVKVPEGLDSAAASSITCAGVTTYKAVKISHIKPGQWIAIYGLGGLGNLALQYAKNVFNAKVIAIDVNDGQLKLAEEMGADLTINSRTEDAAKIVQEKTGGAHAAVVTAVAKAAFNSAVDAVRAGGRVVAVGLPPEAMNLDIPRLVLDGIQVVGSLVGTRQDLTEAFQFAAEGKVVPKVALRPLEDINVIFKEMEQGQIRGRMVIDFRR

SEQ ID NO: 13833 - protein, 341 aa, Salmonella typhi
MKVKAVFINKPGEVETRWVDYPHKKENEVLIKVDAAGICGSDIGAFRGTNPLVTYPRIIGHEVTGIVLQEGTGMPDNIKKGDRVIVDPYIYCGHCYPCSVGRTNCCENLNVIGVHIDGAMQEVVTHPAHLIHKIPDNVPSEMAPLAEPLTIALHALHRANVKAGEYVAIIGAGAIGLMAALSARHYKATPILIDIVEERLRYAQKLGVPYVLNAADDQVIDAIKNITHGTMAQVVIEASGANSAIRNTLDLASFAGRISFTGWPKQETSLPTNLITYKELDLRGSRTSAGEFDEALRMLSTLEINPQDVVSKVVNLDEIPDAVKELDRYPERYLKINAVFH

SEQ ID NO: 13834 - protein, 409 aa, Salmonella typhi
MDKLLERFLHYVSLDTQSKSGVRQVPSTEGQWKLLRLLKQQLEQMGLVNITLSEKGTLMATLPANVEGDIPAIGFISHVDTSPDFSGKNVNPQIVENYRGGDIALGIGDEVLSPVMFPVLHQLLGQTLITTDGKTLLGADDKAGVAEIMTALAVLKGNPIPHGEIKVAFTPDEEVGKGAKHFDVEEFGAQWAYTVDGGGVGELEFENFNAASVNIKIVGNNVHPGTAKGVMVNALSLAARIHAEVPADEAPETTEGYEGFYHLASMKGTVDRAEMHYIIHDFDRKQFEARKRKMMEIAKKVGKGLHPDCYIELVIEDSYYNMREKVVEHPHILDIAQQAMRDCHITPEMKPIRGGTDGAQLSFMGLPCPNLFTGGYNYHGKHEFVTLEGMEKAVQVIVRIAELTGKRGQ

SEQ ID NO: 13835 - protein, 382 aa, Salmonella typhi
  VARIANT (1)...(382): Xaa = Any Amino Acid
MIKLENLTKQFVQKKGQPLKAVDNVNLNVPEGEMCVLLGPSGCGKTTTLKMINRLIAPSSGNILINGENTNDMDTVTLRRNIGYVIQQIGLFPNMTIEENITVVPRMLGWDKARCKQRAEELMDMVALDARKFLHRYPKEMSGGQQQRIGVIRALAADPPVLLMDEPFGAVDPINREVIQNQFLDMQRKLKKTVMLVSHDIDEALKLGDRIAVFRQGRIVQCASPDELLAKPANEFVGSFVGQDRTLKRMLLVSAGDVTDQQPTITXRPSMPLSEAFGIMDDHDIRAXTVIDNDGKPLGFVKRREARNASGICADITHPFRITGKAEDNLRIVLSRLYESNTSWMPIVDEDGRYNGEISQDYIADYLSSGRTRRALNIHESS

SEQ ID NO: 13836 - protein, 509 aa, Salmonella typhi
  VARIANT (1)...(509): Xaa = Any Amino Acid
MRIGIPKERLPNETRVAATPKTVEQLLKLGFSVAIESGAGQLASFDDKAFAQAGADIVDGNAIWQSEIILKVNAPEEEEIALLNPGTTLVSFIWPAQNPGLMEKLAERKVTVMAMDSVPRISRAQSLDALSSMANIAGYRAIVEAAHEFGRFFTGQITAAGKVPPAKVMVIGAGVAGLAAIGAANSLGAIVRAFDTRPEVKEQVQSMGAEFLELDFKEEAGSGDGYAKVMSEAFIKAEMALXAAQAKEVDIIVTTALIPGKRAPKLITRDMVDSMKAGSVIVDLAAQNGGNCEYTVANQVVTTDNGVKVIGYTDLPGRLPTQSSQLYGTNLVNLLKLLCKEKDGNIDVDFDDVVIRGVTVIRDGDITWPAPPIQVSAQPQAAPKAAPAPKEPEKPASPWRKYALMALAIILFGWLADVAPKEFLGHFTVFALACVVGYYVVWNVSHALHTPLMSVTNAISGIIVVGALLQIGQGGWVSFLSFIAVLIASINIFGGFTVTQRMLKMFRKN

SEQ ID NO: 13837 - protein, 456 aa, Salmonella typhi
MELSSLTAVSPVDGRYGDKVSALRGIFSEYGLLKFRVQVEVRWLQKLAAHAAIKEVPAFAADANGYLDTLVANFNEEDAARIKTIERTTNHDVKAVEYFLKEKAAAIPALHDVSEFIHFACTSEDINNLSHALMLKTARDEVILPYWRQVINAVKDLATQYRDIPLLSRTHGQPATPSTLGKEMANVAYRMERQFRQLNQVEILGKINGAVGNYNAHIAAYPEVDWHQFSEEFVTSLGIQWNPYTTQIEPHDYIAELFDCIARFNTILIDFDRDVWGYIALNHFKQKTIAGEIGSSTMPHKVNPIDFENSEGNLGLSNAVLHHLANKLPVSRWQRDLTDSTVLRNLGVGIGYALIAYQSTLKGVSKLEVNRDHLLDELDHNWEVLAEPIQTVMRRYGIEKPYEKLKELTRGKRVDAEGMKQLIDSLALPEAEKTRLKAMTPANYIGRAVNLVDELK

SEQ ID NO: 13838 - protein, 383 aa, Salmonella typhi
  VARIANT (1)...(383): Xaa = Any Amino Acid
MIEYAALKFNVASIPMSESPKKVIVGMSGGVDSSVSAWLLQQQGYQVEGLFMKNWEEDDGEEYCTAAADLADAQAVCDKLGIELHTVNFAAEYWDNVFELFLEEYKAGRTPNPDILCNKEIKFKAFLEFAAEDLGADYIATGHYVRRADVNGKSRLLRGLDGNKDQSYFLYTLGHEQIAQSLFPVGELEKPQVRKIAEDLGLVTAKKKDSTGICFIGERKFRDFLXRYLPAQPGKIITVDGDEIGEHQGLMYHTLGQRKGLGIGGTKDGSEDPWYVVDKDVENNVLIVAQGHEHPRLMSVGLIAQQLHWVDREPFTGTLRCTVKTRYRQTDIPCTINALDDDRIEVIFDEPVAAVTPGQSAVFYSGEVCLGGGIIEQRLPLTV

SEQ ID NO: 13839 - protein, 416 aa, Salmonella typhi
MESKVVVPVEGKKITLQNGKLNVPENPIIPFIEGDGIGVDVTPAMLKVVDAAVEKAYKGERKISWMEIYTGEKSTQVYGQDVWLPAETLDLIRDYRVAIKGPLTTPVGGGIRSLNVALRQELDLYVCLRPVRYYQGTPSPVKHPELTDMVIFRENSEDIYAGIEWKADSADAEKVIKFLREEMGVKKIRFPEHCGIGIKPCSEEGTKRLVRAAIEYAITNDRDSVTLVHKGNIMKFTEGAFKDWGYQLARDEFGGELIDGGPWLKIKNPNTGKEIVVKDVIADAFLQQILLRPAEYDVIACMNLNGDYISDALAAQVGGIGIAPGANIGDECALFEATHGTAPKYAGQDKVNPGSIILSAEMMLRHMQWFEAADLIVKGMEGAIAAKTVTYDFERLMDGAKLLKCSEFGDAIIANM

SEQ ID NO: 13840 - protein, 477 aa, Salmonella typhi
  VARIANT (1)...(477): Xaa = Any Amino Acid
MWQTSNQESEVSMSHSSAPERATGAVITEWRPEDPAFWQQRGHRVASRNLWISVPCLLLAFCVWMLFSAVAVNLPKVGFNFTTDQLFMLTALPSVSGALLXVPYSXMVPLFGGRRWTAFSTGILIVPCVWLGXAVQDTSTPFSTFIIISLLCXXXGAXFASSMANISFFFPKQKQGGALGLNGGLGNMGVSVMQLXAPLVVSLSIFAAFGSHGVEQPDGSQLYLANAAWIWVPFLAIFTLAAWFGMNELATSKASLKEQLPVLKRGHLWIMSLLYLATFGSFIGFSAGFAMLSKTQFPDVQILHYAFFGPFIGALARSAGGAISDRLGGTRVTLINFVLMAIFSGLLFLTLPTGGVGGSFIAFYGVFLALFLTAGLGSGSTFQMISVIFRKLTMDRVKAEGGSDERAMREAATDTAAALGFISAIGAIGGFFIPKAFGSSLALTGSPVGAMKVFLIFYIACVVITWAVYGRHSKNKK

SEQ ID NO: 13841 - protein, 1247 aa, Salmonella typhi
  VARIANT (1)...(1247): Xaa = Any Amino Acid
MSKFLDRFRYFKQKGETFADGHGQLLETNRDWEDGYRQRWQHDKIVRSTHGVNCTGSCSWKIYVKNGLVTWETQQTDYPRTRPDMPNHEPRGCPRGASYSWYLYSANRLKYPLMRKRLMKMWREAKKLHRDPVEAWASIIEDADKAKSFKQARGRGGFVRSSWQEVNELIAASNVYTVKTYGPXRXAGFSPIPAMSMVSYASGARYLSLIGGTCLSFYDWYCDLPPASPQTWGEQTDVPESADWYNSSYIIAWGSNVPQTRTPDAHFFTEVRYKGTKTVAVTPDYAEIAKLCDLWLAPKQGTDAAMALAMGHVMLREFHLDNPRQYFTDYVRRYTDMPMLVMLEERDGYYAAGRMLRAADLVDSLGQENNPEWKTVAINSNGEMVAPNGSIGFRWGEKGKWNLEQRDGTTGAETELQLSLLGSQDEIADVGFPYFGGEGSEYFNHVALDNVLLHKLPAKRLQLADGSSALVTTVYDLTMANYGLERGLNDENCAASYDDTKAYTPAWAEQITGVPRAQIIRIAREFADNADKTHGRSMIIVGAGLNHWYHLDMNYRGLINMLVFCGCVGQSGGGWAHYVGQEKLRPQTGWQPLAFALDWQRPARHMNSTSYFYNHSSQWRYETVTAEELLSPMADKSRYSGHLIDFNVRAERMGWLPSAPQLGTNPLYIAREAEKAGMTPVDYTVKSLKDGSIRFAAEQPENGKNHPRNLFIWRSNLLGSSGKGHEYMLKYLLGTEHGIQGLDLGKQGGVKPEEVEWRDNGLDGKLDLVVTLDFRLSSTCLYSDIVLPTATWYEKDDMNTSDMHPFIHPLSAAVDPAWESKSDWEIYKGIAKKFSEVCVGHLGKETDVVTLPIQHDSAAELAQPLDVKDWKKGECDLIPGKTAPHIMTVERDYPATYERFTSIGPLMEKIGNGGKGIAWNTQSEMDLLRKLNYTKADGPAKGQPMLNTAIDAAEMILTLAPETNGQVAVKAWAALSEFTGRDHTHLATNKEEEKIRFRDIQAQPRKIISSPTWSGLEDEHVSYNAGYTNVHELIPWRTLSGRQQLYQDHQWMRDFGESLLVYRPPIDTRSVKAVMGRKSNGNPEKALNFLTPHQXWGIHSTYSDNLLMLTLSRGGPIVWMSETDAKELGIEDNDWIEVFNSNGALTARAVVSQRVPAGMTMMYHAQERIVNLPGSEITQQRGGIHNSVTRITPKPTHMIGGYAQLAYGFNYYGTVGSNRDEFVVVRKMKNINWLDGEGNDQVQESVK

SEQ ID NO: 13842 - protein, 222 aa, Salmonella typhi
MVQSRQSLFHSGEVLRPMAQLYFYYSAMNAGKSTALLQSSYNYQERGMRTVVYTAEIDDRFGAGKVSSRIGLSSPAKLFNQNTSLFEEIRAESARQTIHCVLVDESQFLTRQQVYQLSEVVDKLDIPVLCYGLRTDFRGELFVGSQYLLAWSDKLVELKTICFCGRKASMVLRLDQDGRPYNEGEQVVIGGNERYVSVCRKHYKDALEEGSLTAIQERHRHI

SEQ ID NO: 13843 - protein, 892 aa, Salmonella typhi
  VARIANT (1)...(892): Xaa = Any Amino Acid
MAVTNVAELNALVERVKKAQREYASFTQEQVDKIFRAAALAAADARIPLAKMAVAESGMGIVEDKVIKNHFASEYIYNAYKDEKTCGVLSEDDTFGTITIAEPIGIICGIVPTTNPTSTAIFKSLISLKTRNAIIFSPHPRAKEATNKAADIVLQAAIAAGAPKDLIGWIDQPSVELSNALMHHPDINLILATGGPGMVKAAYSSGKPAIGVGAGNTPVVIDETADIKRAVASVLMSKTFDNGVICASEQSVVVVDSVYDAVRERFASHGGYMLQGQELKAVQNVILKNGALNAAIVGQPAYKIAELAGFSVPETTKILIGEVTVVDESEPFAHEKLSPTLAMYRAKDFEEAVEKAEKLVAMGGIGHTSCLYTDQDNQPERVAYFGQMMKTARILINTPASQGGIGDLYNFKLAPSLTLGCGSWGGNSISENVGPKHLINKKTVAKRAEXMXWHKLPXSIYFRRGSLPIALDEVITDGHKRALIVTDRFLXNNGYAXQITSVLXAAGVETEVFFEVEADPTLSVVRKGAELANSFXPDVIIALGGGSPMDAAKIMWVMYEHPETHFEELALRFMDIRKRIYKFPKMGVKAKMIAVTTTSGTGSEVTPFAVVTDNATGQKYPLADYALTPDMAIVDANLVMDMPKFLCAFGVLDASTHALEAYVSVLASEFSDGQALQALKLLKENLPASYHEGSKNPVARERVHSAATIAGIAFANAFLGVCHSMAHKLGSQFHIPHGLANALLICNVIRYNANDNPTKQTAFSQYDRPQARRRYAEIADHLGLSAPGDRTAAKIEKLLAWLESIKAELGIPKSIREAGVQEADFLAHVDKLSEDAFDDQCTGANPRYPLISELKQILLDTYYGRDFTEGEVAAKKDVVAAPKAEKKAKKSA

SEQ ID NO: 13844 - protein, 335 aa, Salmonella typhi
  VARIANT (1)...(335): Xaa = Any Amino Acid
MSLSETATQAPQPANVLLEVXDLRVTFATPDGDVTAVNDLNFTLRAGETLGIVGESGSGKSQTAFALMGLLATNGRIGGSATFNGREILNLPERELNTLRAEQISMIFQDPMTSLNPYMRVGEQLMEVLMLHKGMSKAEAFEESVRMLDAVKIPEARKRMKMYPHEFSGGMRQRVMIAMALLCRPKLLIADEPTTALDVTVQAQIMTLLNELKREFNTAIIMITHDLGVVAGICDKVLVMYAGRTMEYGKARDVFYQPVHPYSIGLLNAVPRLDSEGAEMLTIPGNPPNLLRLPKGCPFQPRCPHAMEICNNAPPLEAFSPGRLRACFKPVEELL

SEQ ID NO: 13845 - protein, 257 aa, Salmonella typhi
  VARIANT (1)...(257): Xaa = Any Amino Acid
MICVRSLITSLWVYSSRFYNHNDGAGMKKFTVAALALTTLLSGSAFAHEAGEFFMRAGPATVRPTEGAGGTLGHLNGFDVSNNTQLGLTFTYMATDNIGVELLAATPFRHKVGTGATGDIATVHLLPPTLMAQWYFGDSSSKVRPYVGVGVNYTTFFDNDFNDNGKKTGLSDLSFKDSXGAAGQVGVDYLINRDWLIGASVWYMDIDTTANYKMGGVQQHDSVRLDPWVFMFSAGXRFXSRXVVTKXDXXRRGQKXT

SEQ ID NO: 13846 - protein, 531 aa, Salmonella typhi
  VARIANT (1)...(531): Xaa = Any Amino Acid
MADILLLDNIDSFTWNLADQLRTNGHNVVIYRNHIPAQTLIDRLATMKNPVLMLSPGPGXXSEAGCMPELLTRLRGKLPIIGICLGHQAIVEAYGGYVGQAGEILHGKASSIEHDGQAMFAGLANPLPVARYHSLVGSNVPAGLTINAHFNGMVMAVRHDADRVCGFQFHPESILTTQGARLLEQTLAWAQQKLEPTNTLQPILEKLYQAQTLTQQESHQLFSAVVRGELKPEQLAAALVSMKIRGEHPNEIAGAATALLENAAPFPRPDYLFADIVGTGGDGSNSINISTASAFVAAACGLKVAKHGNRSVSSKSGSSDLLAAFGINLDMNADKSRQALDELGVCFLFAPKYHTGFRHAMPVRQQLKTRTLFNVLGPLINPAHPPLALIGVYSPELVLPIAETLRVLGYQRAAVVHSGGMDEVSLHAPTIVAELHDGEIKSYQLTAEDFGLTPYHQDQLAGGTPEENRDILTRLLQGKGDAAHEAAVAANVAMLMRLHGQEDLKANAQTVLDVLRNGTAYDRVTALAARG

SEQ ID NO: 13847 - protein, 300 aa, Salmonella typhi
MKATPEGSSMSEKLQKVLARAGHGSRREIESIIEAGRVSVDGKIATLGDRVEVTPGLKIRIDGHLISVKESAEQICRVLAYYKPEGELCTRNDPEGRPTVFDRLPKLRGARWIAVGRLDVNTCGLLLFTTDGELANRLMHPSREVEREYAVRVFGQVDESKLRDLSRGVQLEDGPAAFKTIKFSGGEGINQWYNVTLTEGRNREVRRLWEAVGVQVSRLIRVRYGDIPLPKGLPRGGWTELDFAQTNYLRGLVELPPETSSKVAVEKDRRRMKANQIRRAVKRHSQIAGGRRSGGRNNNG

SEQ ID NO: 13848 - protein, 867 aa, Salmonella typhi
  VARIANT (1)...(867): Xaa = Any Amino Acid
MNMGKALVIVESPAKAKTINKYLGNDYVVKSSVGHIRDLPTSGSAAKKSADSTSTKTAKKPKKDERGALVNRMGVDPWHNWDAHYEVLPGKEKVVSELKQLAEKADHIYLATDLDREGEAIAWHLREVIGGDDARYSRVVFNEITKNAIRQAFEQPGELNINRVNAQQARRFMDRVVGYMVSPLLWKKIARGLSAGRVQSVAVRLVVEREREIKAFVPEEFWEIDANTTTPSGEALPLQVTHQNDKPFRPVNREQTLAAVSLLEKARYSVLEREDKPTSSKPGAPFITSTLQQAASTRLGFGVKKTMMMAQRLYEAGYITYMRTDSTNLSQDAVNMVRGYIGDNFGKKYLPDNPNQYASKENSQEAHEAIRPSDVAVMAESLKDMEADAQKLYQLIWRQFVACQMTPAQYDSTTLTVGAGEFRLKARGRILRFDGWTKVMPALRKGDEDRTLPAVNKGDALTLLELTPAQHFTKPPARFSEASLVKELEKRGIGRPSTYASIISTIQDRGYVRVENRRXYAEKMGEIVTDRLEENFRELMNYDXXAXMXDSLDQVANHQAEWKAVLDNFFSDFTQQLDKAEKDPEEGGMRPNQMVLTSIDCPTCGRKMGIRTASTGVFLGCSGYALSPKERCKTTINLVPENEVLNVLEGDDAETNALRAKRRCQKCGTAMDSYLIDPKRKLHVCGNNPTCDGYEIEEGEFRIKGYDGPIVECEKCGSEMHLKMGRFGKYMACTNDECKNTRXXLRNXXXAPPXEDPVPLPELPCEKSDAYFVLRDGAAXIFLAANTFPKSRETRAPLVEELYRFRDRXPEKXRYLADAPQQDPEGNKTVVRFSRKTKQQYVAAEKDGKATGWSAFFVDGKWVEGKK

SEQ ID NO: 13849 - protein, 426 aa, Salmonella typhi
MIVGGGAGGLEMATQLGHKLGRKKKAKITLVDRNHSHLWKPLLHEVATGSLDEGVDALSYLAHARNHGFQFQLGSVMDIDREAKTITIAELRDEKGELLVPERKIAYDTLVMALGSTSNDFNTPGVKEHCIFLDNPHQARRFHQEMLNLFLKYSANLGANGKVNIAIVGGGATGVELSAELHNAVKQLHSYGYKGLTNDALNVTLVEAGERILPALPPRISSAAHNELTKLGVRVLTQTMVTSADEGGLHTKEGEYIQADLMVWAAGIKAPDFMKEIGGLETNRINQLVVEPTLQTTRDPDIYAIGDCASCARPEGGFVPPRAQAAHQMATCAMNNILAQMNGKPLKAYQYKDHGSLVSLSNFSTVGSLMGNLTRGSMMIEGRIARFVYISLYRMHQIALHGYFKTGLMMLVGSINRVIRPRLKLH

SEQ ID NO: 13850 - protein, 309 aa, Salmonella typhi
  VARIANT (1)...(309): Xaa = Any Amino Acid
MNGSLPLYALRMSGPRFTDRVVNMSLKTIKYFSTLIVAVVAVLAAWWLWNYYMQSPWTRDGKIRAEQVSVTPQVSGSITQLNIKDNQFVNAGDVLFVIDKTPFHIAELNAQAQLAKAQSDLAKANNEADRRRHLSRNYISAEDLDSANLNVKAMQASVDVALATLKQAQWQLSQTEVKAPVSGWVTNLSTRTGDYASTGKPLFALVDSHSFYVMGYFEETKLRHIREGEPALITLYSGNVKLQGHVGSIGRAIYDQSVESDSGLVPDIKPNVPWVRLAQRVPVRIEFDALPQDITLVSGTTCSVAIGQR

SEQ ID NO: 13851 - protein, 428 aa, Salmonella typhi
MEILMASSNLIKQLQERGLVAQVTDEDALAERLAQGPIALYCGFDPTADSLHLGHLVPLLCLKRFQQAGHKPVALVGGATGLIGDPSFKAAERKLNTEETVQEWVAKIRKQVAPFLDFDCGENSAIAANNYDWFGSMNVLTFLRDIGKHFSVNQMINKEAVKQRLNRDDQGISFTEFSYNLLQGYDFACLNKLHGVALQIGGSDQWGNITSGIDLTRRLHQNQVFGLTVPLITKADGTKFGKTEGGAVWLDPKKTSPYKFYQFWINTADADVYRFLKFFTFMDIEEINALEEEDKNSGKAPRAQYVLAEQVTRLVHGEEGLVAAKRITECLFSGSLSALSEADFEQLAQDGVPMVEMEKGADLMQALVDAELQPSRGQARKTIASNAVTINGEKQSDPEYIFNDEDRLFGRYTLLRRGKKNYCLICWK

SEQ ID NO: 13852 - protein, 199 aa, Salmonella typhi
  VARIANT (1)...(199): Xaa = Any Amino Acid
MNKQTEHDTREHLLXTGXQLCMQRGFTGMGLSELLKTAQVPKGSFYHYFRSKEXFGVAMLERHYACYHQRLTAHFTSGPGNHRDRLLAWYQETLKQFCQQGAISGCLTVKLSAEVCDLSEDMRSTMDKGAQEIMALLARALEDGRNSHCLHFTGQPLPQAQVLYALWLGANLQAKISRSAAPLENALAHVKTIIATPEQ

SEQ ID NO: 13853 - protein, 951 aa, Salmonella typhi
MEKTYNPQDIEQPLYEHWEKQGYFKPNGDESKESFCIMIPPPNVTGSLHMGHAFQQTIMDTMIRYQRMQGKNTLWQVGTDHAGIATQMVVERKIAAEEGKTRHDYGRDAFIDKIWQWKAESGGTITRQMRRLGNSVDWERERFTMDEGLSNAVKEVFVRLYKEDLIYRGKRLVNWDPKLRTAISDLEVENRESKGSMWHIRYPLADGAKTADGKDYLVVATTRPETVLGDTGVAVNPEDPRYKDLIGKFVILPLVNRRIPIVGDEHADMEKGTGCVKITPAHDFNDYEVGKRHALPMINILTFDGDIRESAEVFDTKGEESNVYSSEIPAEFQKLERFAARKAIVAAVDALGLLEEIKPHDLTVPYGDRGGVVIEPMLTDQWYVRADVLAKPAVEAVENGDIQFVPKQYENMYFSWMRDIQDWCISRQLWWGHRIPAWYDNDGNVYVGRTEDEVRQENNLGADVQLRQDEDVLDTWFSSALWTFSTLGWPENTDALRQFHPTSVMVSGFDIIFFWIARMIMMTMHFIKDENGKPQVPFHTVYMTGLIRDDEGQKMSKSKGNVIDPLDMVDGISLPELLEKRTGNMMQPQMAEKIRKRTEKQFPNGIEPHGTDALRFTLAALASTGRDINWDMKRLEGYRNFCNKLWNASRFVLMNTEEQDCGFNGGEMTLSLADRWILAEFNQTVKAYREALDNFRFDIAAGILYEFTWNQFCDWYLELTKPVMTGGSESELRGTRHTLVTVLEGLLRLAHPIIPFITETIWQRVKVICGITADTIMLQPFPEYNAAQVDEAALADTEWLKQAIVAVRNIRAEMNIAPGKPLELLLRGCSEEAVRRVNDNRSFLLNLARLESITVLPADDKGPVSMTKIIDGAELLIPMAGLINKEDELARLAKEVAKIEGEIARIEGKLSNEGFVARAPEAVIAKEREKLDGYAEAKAKLIEQQAVISAL

SEQ ID NO: 13854 - protein, 503 aa, Salmonella typhi
  VARIANT (1)...(503): Xaa = Any Amino Acid
MEFSVKSGSPEXQRSACIVVGVFEPRRLSPIAEQLDKISDGYISALLRRGELEGKPGQTLLLHHVPNVLSERILLIGCGKERELDERQYKQVIQKTINTLNDTGSMEAVCFLTELHVKGRNNYWKVRQAVETAKETLYSFDQLKTNKSEPRRPLRKMVFNVPTRRELTSGERAIQHGLAIAAGIKAAKDLGNMPPNICNAAYLASQARQLADSYSKNVITRVIGEQQMRELGMNAYLAVGHGSQNESLMSVIEYKGNPSEDARPIVLVGKGLTFDSGGISIKPSEGMDEMKYDMCGAAAVYGVMRMVAELKLPINVIGVLAGCENMPGGRAYRPGDVLTTMSDQTVEVLNTDAEGRLVLCDVLTYVERFEPEAVIDVATLTGACVIALGHHITGLMSNHNPLAHELIGASEQAGDRAWRLPLGDEFQEQLESNFADMANIGGRPGGAITAGCFLSRFTRKYNWAHLDIAGTAWRSGKAKGATGRPVALLSQFLLNRAGFNGEE

SEQ ID NO: 13855 - protein, 317 aa, Salmonella typhi
  VARIANT (1)...(317): Xaa = Any Amino Acid
MVFKGDVMENKRTLVVALGGNALLKRGEPLEADIQRKNIELAARTIAQLTRQWRVVLVHGNGPQIGLLALQNSAYANVTPYPLDILGAESQCMIGYMLQQALKNHLPEREISVLLTQVEVDANDPAFLNPTKYIGPXYDEAQARALQAEKGWVFKADGNAFRRVVPSSQPKRIVENDAIRALISRDHLVICNGGGGVPVVEKADGYHGIEAVIDKDLSAALLASQIHADALLILTDVDAVYLDWGKPTQRPLAQVTPELLREMQFDAGSMGPKVTACAEFVSHCCGIAGIGSLADGQAILAGEKGTLIRCETADVDA

SEQ ID NO: 13856 - protein, 419 aa, Salmonella typhi
MAWNQPGNNGQDRDPWGSSKPGSNSGGNGNKGGRDQGPPDLDDIFRKLSKKLGGFGGGKGTGSGGGSSSQGPRPQLGGRIVAIAAAAVVIIWAASGFYTIKEAERGVVTRFGKFSHLVEPGLNWKPTFIDDVTPVNVEAVRELAASGVMLTSDENVVRVEMNVQYRVTDPQKYLFSVTSPDDSLRQATDSALRGVIGKYTMDRILTEGRTVIRSDTQRELEETIKPYNMGITLLDVNFQAARPPEEMKAAFDDAIAARENEQQYIREAEAYTNEVQPRANGQAQRILEEARAYKTQTILEAQGEVARFAKILPEYKAAPQITRERLYIETMEKVLSHTRKVLVNDKSGNLMVLPLDQMLKGGNAPAAKSDNSASNLLRLPPSTKSNASGASNTSSSNQGDIMDQRRANAQRNDYQRQGE

SEQ ID NO: 13857 - protein, 432 aa, Salmonella typhi
  VARIANT (1)...(432): Xaa = Any Amino Acid
MGNNVVVLGTQWGDEXKGKIVDLLTERAKYVVRYQGGHNAGHTLVINGEKTVLHLIPSGILRENVTSIIGNGVVLSPSALMKEMKELEDRGIPVRERLLLSEACPLILDYHVALDNAREKARGAKAIGTTGRGIGPAYEDKVARRGLRVGDLFDKETFAEKLKEVMEYHNFQLVNYYKAEAVDYQKVLDDTMAVADILTSMVVDVSDLLDQARQRGDFVMFEGAQGTLLDIDHGTYPYVTSSNTTAGGVATGSGLGPRYVDYVLGILKAYSTRVGAGPFPTELFDETGEFLCKQGNEYGATTGRRRRTGWLDTVAVRRAVQLNSLSGFCLTKLDVLDGLKEVKLCVAYRMPDGREVTTTPLAADDWKGVEPIYETMPGWSESTFGVKDRSGLPQAALNYIKRIEELTGVPIDIISTGPDRTETMILRDPFDA

SEQ ID NO: 13858 - protein, 131 aa, Salmonella typhi
  VARIANT (1)...(131): Xaa = Any Amino Acid
MRHYEIVFMVHPDQSEQVPGMIERYSAAITGAEGKIHRLEDWGRRQLAYPINKLHKAHYVLMNVEAPQEVIDELETTFRFNDAVIRSMVMRTKHAVTEASPMVKAXDERRERRDDFANETADDAEAGDSEE

SEQ ID NO: 13859 - protein, 75 aa, Salmonella typhi; identical to SEQ ID NO: 10459

SEQ ID NO: 13860 - protein, 149 aa, Salmonella typhi
MQVILLDKVANLGSLGDQVNVKAGYARNFLVPQGKAVPATKKNVEYFEARRAELEAKLADVLAAANARAEKINALETVTIASKAGDEGKLFGSIGTRDIADAVTAAGVDVAKSEVRLPNGVLRTTGEHEVNFQVHSEVFAKVIINVVAE

SEQ ID NO: 13861 - protein, 308 aa, Salmonella typhi
  VARIANT (1)...(308): Xaa = Any Amino Acid
MIMRFRQLLPLFGALFALYIIWGSTYFVIRIGVESWPPLMMAGVRFLSAGMLLMAFLLLRGEKLPPLRQTINAALIGLLLLAVGNGLVTVAEHQNVPSGIAAVVVATVPLFTLCFSYFFGIKTRKLEWVGIAIGLAGIILLNSGGNLSGNPWGAILILIGSMSWAFGSVYGSRIALPVGMMAGAIXMLAAGVVLLCAAFLSGEKLATLPGLSGFMAVGYLALFGSIIAINAYMYLIRNVXPALAXSYAYVNPVVAVLLGTGXGGXRLSPVEWAALGVIVFAVVLVTLGKYLFPARAVITPCKTEDSRQ

SEQ ID NO: 13862 - protein, 323 aa, Salmonella typhi
  VARIANT (1)...(323): Xaa = Any Amino Acid
MSKIYEDNSLTIGHTPLVRLNRIGNGRILAKVESRNPSFSVKCRIGANMIWDAEKRGVLKPGVELVEPTSGNTGIALAYVAAARGYKLTLTMPETMSIERRKLLKALGANLVLTEGAKGMKGAIQKAEEIVASDPQKYLLLQQFSXPANPEIHEKTTGPEIWEDTDGQVDVFISGVGTGGTLTGVTRYIKGTKGKTDLITVAVEPTDSPVIAQALAGEEIKPGPHKIQGIGAGFIPGNLDLKLIDKVVGITNEEAISTARRLMEEEGILAGISSGAAVAAALKLQEDESFTNKNIVVILPSSGERYLSTALFADLFTEKELQQ

SEQ ID NO: 13863 - protein, 482 aa, Salmonella typhi
  VARIANT (1)...(482): Xaa = Any Amino Acid
MISGILASPGIAFGKALLLKEDEIVIDRKKISADKVDQEVERFLSGRAKASAQLEAIKTKAGETFGEEKEAIFEGHIMLLEDEELEQEIIALIKDKHMTADAAAHEVIEGQATXLEELDDEYLKERAADVRDIGKRLLRNILXLAIIDLSAIQEEVILVAADLTPSETAQLNLQKVLGFITDAGGRTSHTSIMARSLELPAIVGTGSVTAQVKNGDYLILDAVNNQVYVNPTNDVIEQLRAVQEQVATEKAELAKLKDLPAITLDGHQVEVCANIGTVRDVEGAERNGAEGVGLYRTEFLXMDRDALPXEEEQXAAYKAFAEACGSQTXIVRTMDIGGDKELPYMYFPKEENPFLGWRAVRIAMDRKEILRDQVRAILRASAFGKLRIMFPMIISVEEVRALRKEIEIXKQELRDEGKAFDESIEIGVMVETPAAATIARHLAKEVDFFSIGXNDLTQYXXAVDXGNDMISHXYQPMXPXXX

SEQ ID NO: 13864 - protein, 671 aa, Salmonella typhi
MEPIEQQLTELRTTLRHHEYLYHVMDAPEILDAEYDRLMRELRELEAQRPDLITPDSPTQRVGAAPLTAFNQIRHEVPMLSLDNVFDEESFLAFNKRVQDRLKSTENVIWCCELKLDGLAVSILYENGVLVSAATRGDGTTGEDITSNVRTIRAIPLKLHGDNIPARLEVRGEVFLPQTGFEKINEDARRTGGKVFANPRNAAAGSLRQLDPRITAKRPLTFFCYGVGILEGGELPDTHLGRLLQFKAWGLPVSDRVTLCDSPQAVLDFYHNVEKDRPTLGFDIDGVVIKVNSLALQEQLGFVARAPRWAVAFKFPAQEQMTFVRDVEFQVGRTGAITPVARLEPVQVAGVLVSNATLHNADEIERLGLRIGDKVVIRRAGDVIPQVVNVVLSERPEETRPIVFPTHCPVCGSDVERVEGEAVTRCTGGLICGAQRKESLKHFVSRRAMDVDGMGDKIIDQLVEREYVHTPADLFRLTAGKLTGLDRMGPKSAQNVVNALEKAKATTFARFLYALGIREVGEATAAGLAAYFGTLEALQAATIDELQKVPDVGIVVATHVFNFFAEESNRDVIGQLLAEGVHWPAPVVINAQEIDSPFAGKTVVLTGSLSQMSRDDAKARLVALGAKVAGSVSKKTDLVIAGEAAGSKLAKAQELGITVIDEAEMIRLLGA

SEQ ID NO: 13865 - protein, 511 aa, Salmonella typhi
  VARIANT (1)...(511): Xaa = Any Amino Acid
MTTNYIFVTGGVVSSLGKGIAAASLAAILEARGLNVTIMXLDPYINVDPGTMSPIQHGEVFVTEDGAETDLDLGHYERFIRTKMSRRNNFTTGRIYSDVLRKERRGDYLGATVQVIPHITNAIKERVLEGGEGHDVVLVEIGGTVGDIESLPFLEAIRQLAVDIGREHALFMHLTLVPYLAAAGEVKTKPTQHSVKELLSIGIQPDILICRSDRAVPANERAKIALFCNVPEKAVISMKDVDSIYKIPGLLKSQGLDDYICKRFSLNCPEANLSEWEQVIYEEANPAGEVTIGMVGKYIELPDAYKSVIEALKHGGLKNRVTVNIKLIDSQDVETRGVEILKDLDAILIPGGFGYRGVEGKIATARYARENNIPYLGICLGMQVALIEFARNVAGMDNANSTEFVPDCKYPVVALITEWRDEDGNVEVRSEKSDLGGTMRLGAQQCQLSDDSLVRQLYGASTIVERHRHRYEVNNMLLKQIEAAGXXXXGRSGDDQLVEIIEVPNHXWXVX

SEQ ID NO: 13866 - protein, 432 aa, Salmonella typhi
  VARIANT (1)...(432): Xaa = Any Amino Acid
MSKIVKVIGREIIDSRGNPTVEAEVHLXGGXVGMAAAPSGASTGSREALELRDGDKSRFLGKGVTKAVGAVNGPIAQAILGKDAKDQAGIDKIMIDLDGTENKSNFGANAILAVSLANAKAAAAAKGMPLYEHIAELNGTPGKYSMPVPMMNIINGGEHADNNVDIQEFMIQPVGAKTVKEAIRMGSEVFHHLAKVLKGKGMNTAVGDEGGYAPNLGSNAEALAVIAEAVKAAGYELGKDITLAMDCAASEFYKDGKYVLAGEGNKAFTSEEFTHFLEELTKQYPIVSIEDGLDESDWDGFAYQTKVLGDKIQLVGDDLFVTNTKILKEGIEKGIANSILIKFNQIGSLTETLAAIKMAKDAGYTAVISHRSGETEDATIADLAVGTAAGQIKTGSMSRSDRVAKYNQLIRIEEALGEKAPYNGRKEIKGQA

SEQ ID NO: 13867 - protein, 236 aa, Salmonella typhi
  VARIANT (1)...(236): Xaa = Any Amino Acid
MAATLLDVCAVXPAAGFGRRMQTECPXQYLSIGNKTILEHSVHALLAHPRVTRVVIAISPGDHRFAQLPLANHPQITVVDGGNERADSVLAGLQAVAKAQWVLXHDAARPCLHQDDLARLLAISENSRVGGILASPVRDTMKRGEPGKNAIAHTVERADLWHALTPQFFPRELLHDCLTRALNEGATITDEASALEYCGFHPALVEGRADNIKVTRPEDLALAEFYLTRTIHQEKA

SEQ ID NO: 13868 - protein, 298 aa, Salmonella typhi
MEQDLARIEQFLDALWLERNLAENTLSAYRRDLSMVVAWLHHRGKTLATAQADDLQTLLAERVEGGYKATSSARLLSAMRRFFQHLYREKYREDDPSAQLASPKLPQRLPKDLSEAQVERLLQAPLIDQPLELRDKAMLEVLYATGLRVSELVGLTMSDISLRQGVVRVIGKGNKERLVPLGEEAVYWLETYLEHGRPWLLNGVSIDVLFPSQRAQQMTRQTFWHRIKHYAVLAGIDSEKLSPHVLRHAFATHLLNHGADLRVVQMLLGHSDLSTTQIYTHVATERLRQLHQQHHPRA

SEQ ID NO: 13869 - protein, 855 aa, Salmonella typhi
  VARIANT (1)...(855): Xaa = Any Amino Acid
MNESFDKDFSNHTPMMQQYLKLKAQHPEILLFYRMGDFYELFYDDAKRASQLLDISLTKRGASAGEPIPMAGIPHHAVENYLAKLVNQGESVAICEQIGDPATSKGPVERKVVRIVTPGTISDEALLQERQDNLLAAIWQDGKGYGYATLDISSGRFRLSEPADRETMAAELQRTNPAELLYAEDFAEMALIEGRRGLRRRPLWEFEIDTARQQLNLQFGTRDLVGFGVENASRGLCAAGCLLQYVKDTQRTSLPHIRSITMERQQDSIIMDAATRRNLEITQNLAGGVENTLAAVLDCTVTPMGSRMLKRWLHMPVRNTDILRERQQTIGALQDTVSELQPVLRQVGDLERILARLALRTARPRDLARMRHAFQQLXELHAQLETVDSAPVQALRKKMGDFAELRDLLERAIIDAPPVLVRDGGVIAPGYHEELDEWRALADGATDYLDRLXIRERERTGLDTLKVGYNAVHGYYIQISRGQSHLAPINYVRRQTLKNAERYIIPELKEYEDKVLTSKGKALALEKQLYDELFDLLLPHLADLQQSANALAELDVLVNLAERAWTLNYTCPTFTDKPGIRITEGRHPVVEQVLNEPFIANPLNLSPQRRMLIITGPNMGGKSTYMRQTALIALLAYIGSYVPAQNVEIGPIDRIFTRVGAADDLASGRSTFMVEMTETANILHNATENSLVLMDEIGRGTSTYDGLSLAWACAENLANKIKALTLFATHYFELTQLPEKMEGVANVHLDALEHGDTIAFMHSVQDGAASKSYGLAVAALAGVPKEVIKRARQKLRELESISPNAAATQVDGTQMSLLAAPEETSPAVEALENLDPDSLTPRQALEWIYRLKSLV

SEQ ID NO: 13870 - protein, 577 aa, Salmonella typhi
MKQQRQLRRREADETAELPADLPPLLRRLYASRGVRSARELERSVKGMLPWQQLSGIDNAVEILYNAFREGTRIIVVGDFDADGATSTALSVLGMRALGCDNISYLVPNRFEDGYGLSPEVVDQAKARGAQLIVTVDNGISSHAGVAHAKTLRIPVIVTDHHLPGDTLPDAEAIINPNLRDCEFPSKSLAGVGVAFYLMLALRTFLRDKGWFDERGIAPPNLAELLDLVALGTVADVVPLDANNRILTWQGLSRIRAGKCRPGIKALLEISNRDPQQLAASDLGFALGPRLNAAGRLDDMSVGVALLLCDNLGEARVLASELDALNQTRKEIEQGMQAEALILCEKLERSSETLPGGLAMYHPEWHQGVVGILASRIKERFHRPVIAFAPAGDGTLKGSGRSIQGLHMRDALERLDTLYPDLMIKFGGHAMAAGLSLEEHKFEQFQQRFGELVTEWLDPALLQGEVISDGPLSAAEMSMEVAQLLRDAGPWGQMFPEPLFDGRFRLLQQRLVGERHLKVMVEPVGGGPLLDGIAFNIDTTCWPDNGVREVELAYKLDINEFRGNRSLQIIIDDIWPL

SEQ ID NO: 13871 - protein, 82 aa, Salmonella typhi
MNMDIEARVKKVITSCIAVDVDSINGQTHLVEDLYADSLDLIDIVFGLSEEFDISCNENDLPDMTTFADICRVVKKSLESRV

SEQ ID NO: 13872 - protein, 328 aa, Salmonella typhi
  VARIANT (1)...(328): Xaa = Any Amino Acid
MNXVIPXKPVRRSXPVFXQFMVARGFMEVETPMMQVIPGGASARPFITHHNALDLDMXLRIAPELYLKRLVVGGFERVFEINRNFRNEGISVRHNPEFTMMELYMAYADYKDLIELTESLFRTLAQDVLGTTQVPYGDEVFDFGKPFEKLTMHEAIKKYRPETDMADLDNFDSAKAIAESIGIHVEKSWGLGRIVTEIFDEVAEAHLIQPTFITEYPAEVSPLARRNDVNPEITDRFEFFIGGREIGNGFSELNDAEDQAQRFLDQVNAKAAGDDEAMFYDEDYVTALEHGLPPTAGLGIGIDRMVMLFTNSHTIRDVILFPAMRPVK

SEQ ID NO: 13873 - protein, 290 aa, Salmonella typhi
MCTTCGCAEGNLYIEGDEHNPHSAFRSAPFAPAARPALNITGIKTPDFTPSQTAEGDLHYGHGEAGTHAPGMSQRRMLEVEIDVLDKNNRLAERNRARFAARQQLVLNLVSSPGSGKTTLLTETLMKLKDRVPCAVIEGDQQTVNDAARIRATGTPAIQVNTGKGCHLDAQMIADAAPRLPLDDHGILFIENVGNLVCPASFDLGEKHKVAVLSVTEGEDKPLKYPHMFAAASLMLLNKVDLLPYLNFDVEKCIASAREVNPEIEIILISATSGEGMDQWLAWLEAQRCA

SEQ ID NO: 13874 - protein, 876 aa, Salmonella typhi
MSKSTAEIRQAFLDFFHSKGHQVVASSSLVPNNDPTLLFTNAGMNQFKDVFLGLDKRNYSRATTSQRCVRAGGKHNDLENVGYTARHHTFFEMLGNFSFGDYFKHDAIQFAWELLTGENWFALPKERLWVTVYETDDEAYEIWEKEVGIPRERIIRIGDNKGAPYASDNFWQMGDTGPCGPCTEIFYDHGDHIWGGPPGSPEEDGDRYIEIWNIVFMQFNRQADGTMEPLPKPSVDTGMGLERIAAVLQHVNSNYDIDLFRTLIEAVAKVTGSTDLGNKSLRVIADHIRSCAFLVADGVLPSNENRGYVLRRIIRRAVRHGNMLGAKETFFYKLVGPLIEVMGSAGEELKRQQAQVEQVLKTEEEQFARTLERGLALLDEELAKLQGDTLDGETAFRLYDTYGFPVDLTADVCRERNIKVDEAGFEAAMEEQRRRAREASGFGADYNAMIRVDSASEFKGYDHLELNGKVTALFVDGKAVEAINAGQEAVVVLDQTPFYAESGGQVGDKGELKGAGFTFAVDDTQKYGQAIGHLGKLSAGALKVGDAVQADVDEARRARIRLNHSATHLMHAALRQVLGTHVAQKGSLVSDKVLRFDFSHNEAMKPSEIREVEDLVNAQIRRNVPIETNIMDLDAAKAKGAMALFGEKYDERVRVLSMGDFSTELCGGTHASRTGDIGLFRIISESGTAAGIRRIEAVTGEGAMATVHAQSDRLNDIAHLLKGDSQNLGDKVRAVLERTRQLEKELQQLKDQAAAQESANLSSKAVDLNGVKLLVSELAGIEPKMLRTMVDDLKNQLGSTVIVLATVVEGKVSLIAGVSKDVTDRVKAGELIGMVAQQVGGKGGGRPDMAQAGGTDAAALPAALASVQGWVSAKLQ

SEQ ID NO: 13875 - protein, 364 aa, Salmonella typhi
MAQQTPLYEQHTLCGARMVDFHGWMMPLHYGSQLDEHHAVRTDAGMFDVSHMTIVDLHGSRTREFLRYLLANDVAKLTKTGKALYSGMLNASGGVIDDLIVYYFTEDFFRLVVNSATREKDLSWITQHAEPYAIDITVRDDLSLIAVQGPNAQEKAATLFTDQQRHAVEGMKPFFGVQAGDLFIATTGYTGEAGYEIAMPNEKAADFWRALVEAGVKPCGLGARDTLRLEAGMNLYGQEMDEGISPLAANMGWTIAWEPADRDFIGREALEMQREKGHEQLVGLVMTEKGVLRNELPVRFTDAQGNQQEGIITSGTFSPTLGYSIALARVPAGIGETAIVQIRNREMPVKVTKPVFVRNGKAVA

SEQ ID NO: 13876 - protein, 90 aa, Salmonella typhi
  VARIANT (1)...(90): Xaa = Any Amino Acid
MSHTIRDKQKLKARTSKIQGQVIALKXMLDEPHECAAVLQQIAAIRGAVNGLMREVIKGHLTEHIVHQSDEARREEDLDVILKVLDSYIK

SEQ ID NO: 13877 - protein, 402 aa, Salmonella typhi
MAVSFCAEVVMKEVVIVGALRTPIGCFQGTLARHSAVELGSMVVKALIERTGVDANAIDEVILGQVLTAGAGQNPARQSAIKGGLPTTVSAITINDVCGSGLKALHLATQAIQCGEADIVIAGGQENMSRAPHVLNDSRTGALPDADNLVDSLVHDGLWDAFNDYHIGVTAENLAREYGISRELQDAYALSSQQKARAAIDTGRFKDEIVPIVTQRNGQTAIVDTDEQPRADASAEGLALLHPAFDSLGSVTAGNASSINDGAAAVMMMSETKAQALGLPVLARIRAFASVGVDPALMGIAPVYATRRCLERAGWQLTEVDLIEANEAFAAQALSVGKMLEWDERRVNVNGGAIALGHPIGASGCRILVSLVHEMVKRDARKGLATLCIGGGQGVALTIERD

SEQ ID NO: 13878 - protein, 253 aa, Salmonella typhi
MILNAFSLEGKVAVVTGCDTGLGQGMALGLAEAGCDIVGINIVEPTETIARVTALGRRFLSLTADLRQIDGIPALLERAVAEYGHIDILVNNAGLIRREDAIDFTEKDWDDVMNLNIKSVFFMSQAAAKYFIAQGNGGKIINIASMLSFQGGIRVPSYTASKSGVMGITRLMANEWAKHNINVNAIAPGYMSTNNTQQLRADAQRSAEILDRIPAGRWGLPGDLMGPVVFLASSAADYINGYTIAVDGGWLAR

SEQ ID NO: 13879 - protein, 129 aa, Salmonella typhi; identical to SEQ ID NO: 10289

SEQ ID NO: 13880 - protein, 748 aa, Salmonella typhi
MLTRLREIVEKVASAPRLNEALNILVTDICLAMDTEVCSVYLADHDRRCYYLMATRGLKKPRGRTVALAFDEGIVGLVGRLAEPINLADAQKHPSFKYIPSVKEERFRAFLGVPIIQRRQLLGVLVVQQRELRQYDESEESFLVTLATQMAAILSQSQVTALFGQYRQTRIRALPAAPGVAIATGWQDATMPLMEQVYEASTLDTSLERERLTGALEEAANEFRRYSKRFAAGAQKETAAIFDLYSHLLSDARLRRELFAEVDKGAVAEWAVKKIIEKFAEQFAALTDNYLKERAGDLRTLGQRLLFHLDDSVQGPNAWPERFILVADELSATTLAELPQDRLAGVVVRDGAANSHAAIMVRALGIPTVMGADIQPSVLHRRTLVVDGYRGELLVDPEPVLIQEYQRLISEEIELSRLAEDDVNLPAQLKSGERIKVMLNAGLSPEHEEKLGSRIDGIGLYRTEIPFMLQSGFPSEEEQVAQYQGMLQMFNDKPVTLRTLDVGADKQLPYMPISEENPCLGWRGIRITLDQPEIFLIQVRAMLRANAATGNLSILLPMVTSIDEVDEARRLIERAGREVEEMIGYAIPKPRIGIMLEVPSMVFMLPHLANRIDFISVGTNDLTQYILAVDRNNTRVASIYDSLHPAMLRALSMIAQEAEKHGLDLRLCGEMAGDPMCVAILIGLGYRHLSMNGRSVARVKYLLRHIDFEDAQTLARRSLEAQMATEVRHQVAAFMERRGMGGLIRGGL

SEQ ID NO: 13881 - protein, 477 aa, Salmonella typhi
MRKLTLPKDFLWGGAVAAHQVEGGWNKDGKGPSICDVLTSGAHGVPREITQNVVAGKYYPNHEAVDFYGHYKEDIRLFAEMGFKCFRTSIAWTRIFPNGDESQPNEAGLKFYDDMFDELLKYNIEPVITLSHFEMPLHLVQHYGGWTNRKVVDFFVRFAEVVFERYKHKVKYWMTFNEINNQRNWRAPLFGYCCSGVVYTEHENPEETMYQVLHHQFVASTLAVKAARRINPQMKVGCMLAMVALYPFSCKPEDVMFAQESMRERYVFTDVQLRGYYPSYVLNEWERRGFNIKMEDGDLEVLREGTCDYLGFSYYMTNAVKAEGGSGDAISGFEGSVPNPYVKASDWGWQIDPVGLRYSLCELYERYQKPLFIVENGFGAYDKVEEDGSINDDYRIDYLRAHIEEMKKAVTYDGVDLMGYTPWGCIDCVSFTTGQYSKRYGLIYVNKHDDGTGDMSRSRKKSFNWYKEVIASNGEKL

SEQ ID NO: 13882 - protein, 305 aa, Salmonella typhi
  VARIANT (1)...(305): Xaa = Any Amino Acid
MSKRLPPLNALRVFDAAARHLSFTRAAEELFVTQAAVSHQIKSLEDFLGLKLFRRRNRSLLLTEEGQSYFLDIKEIFSQLTEATRKLQARSAKGALTVSLPPSFAIQWLVPRLSSFNSAYPGIDVRIQAVDRQEDKLADDVDVAIFYGRGNWPGLRVEKLYAEYLLPVCSPLLLTGEKPLKTPEDLAKHTLLHDASRRDWQAYTRQLGLNHINVQQGPIFSHSAMVLQAAIHGQGIALANNVMAQSEIEAGRLVCPFNDVLVSKNAFYLVCHDSQAELGXXAAFRQWILAKAATEQEXXRXRYEX

SEQ ID NO: 13883 - protein, 309 aa, Salmonella typhi
MKTAGNLIVLGSINADHILNLESFPTPGETVTGSHYQVAFGGKGANQAVAAGRSGANIAFIACTGDDDIGDSIRKQLVSDRIDIAPVSVIKGESTGVALIFVNGEGENVIGIHAGANAALSPALVDAQRERIAQADALLMQLESPLESVLAAAKIAHQHHTTVALNPAPARELPDELLALVDIITPNETEAEKLTGVRVENDDDVAKAAQVLHDKGIRTVLITLGSRGVWASVNGEGRRVPGFSVEAVDTIAAGDTFNGAFITAILEETPLPEAIRFAHAAAAIAVTRKGAQPSVPWREEIEAFLHQQG

SEQ ID NO: 13884 - protein, 329 aa, Salmonella typhi
  VARIANT (1)...(329): Xaa = Any Amino Acid
MKDVARLAGVSTSTVSHVINKDRFVSETITEKVEAAIKSLNYAPSALARSLKLNQTRTIGXXITASTNPFYSELVRGVERSCFERGYSLVLCNTEGDEQRMNRNLETLMQKRVDGLLLLCTETHQPSREIMERYPSIPTVMMDWSPFDGEGDSDLIQDNSLLGGDLATQHLIDKGFTRIACITGPLDKTPARLRLEGYRAAMKRAGLAIPQGYEITGDFEFGGGFDAMQALLAHQQRPQAVFTGNDAMAVGAYQALYQAGLRIPQDMAVIGYDDIELARYMTPPLTTIHQPKDELGELAIDVLIHRMAQPALQQQRLQLTPVLTVRGSV

SEQ ID NO: 13885 - protein, 449 aa, Salmonella typhi
MLDKIVIANRGEIALRILRACKELGIKTVAVHSSADRDLKHVLLADETVCIGPAPSVKSYLNIPAIISAAEITGAVAIHPGYGFLSENANFAEQVERSGFIFIGPKADTIRLMGDKVSAITAMKKAGVPTVPGSDGPLGDDMNANRAHAKRIGYPVIIKASGGGGGRGMRVVRSDAELAQSISMTKAEAKAAFSNDMVYMEKYLENPRHIEIQVLADGQGNAIYLAERDCSMQRRHQKVVEEAPAPGITPELRRYIGERCAKACVDIGYRGAGTFEFLFENGEFYFIEMNTRIQVEHPVTEMITGVDLIKEQLRIAAGQPLSITQDEVVVRGHAVECRINAEDPNTFLPSPGKITRFHAPGGFGVRWESHIYAGYTVPPYYDSMIGKLICYGENRDVAIARMKNALQELIIDGIKTNIDLQTRIMNDEHFQHGGTNIHYLEKKLGLQEK

SEQ ID NO: 13886 - protein, 156 aa, Salmonella typhi
MDIRKIKKLIELVEESGISELEISEGEESVRISRTTANAGFPVMQQAYAAPMMQQPALSNAVAPAATPAMEAPAAAEISGHIVRSPMVGTFYRTPSPDAKAFIEVGQKVNVGDTLCIVEAMKMMNQIEADKAGTVKAILVESGQPVEFDEPLVVIE

SEQ ID NO: 13887 - protein, 321 aa, Salmonella typhi
MTTQAVSGRRYFTKAWLLEQKSLIALLVLIAIVSTLSPNFFTVNNLFNILQQTSVNAIMAVGMTLVILTSGIDLSVGSLLALTGAVAASIVGVEVNALVAVAAALALGAAIGAVTGVIVAKGRVQAFIATLVMMLLLRGVTMVYTDGSPVNTGFTDNADLFGWFGIGRPLGVPTPVWIMAIVFIAAWYMLHHTRLGRYIYALGGNEAATRLSGISVSKVKIIVYSLCGLTASLAGIIEVARLSSAQPTAGTGYELDAIAAVVLGGTSLAGGKGRIVGTLIGALILGFLNNGLNLLGVSSYYQMIVKAVVILLAVLVDNKKQ

SEQ ID NO: 13888 - protein, 569 aa, Salmonella typhi
MSRKQLALFEPVLLVQALTDAVKKLSPRAQWRNPVMFVVWAGSVLATLLTLAMVTGQIAGSALFTGVISLWLWFTVLFANFAEALAEGRSKAQANSLKGVKKTAFARRLRAPRHDAQADNVPAAELRKGDIVLVKAGDIIPCDGEVIEGGASVDESAITGESAPVIRESGGDFASVTGGRAVEAAGDVDVLLLDKTGTITLGNRQASDFIPARGVDERTLADAAQLASLADETPEGRSIVILAKQRFNLRERDVQSLHATFVPFTAQSRMSGINIDNRMIRKGSVDAIRRHVESNGGHFPADVEQNVENVARLGATPLVVVEGARVLGVIALKDIVKGGIKERFAQLRKMGIKTVMITGDNRLTAAAIAAEAGVDDFLAEATPEAKLALIRQYQAEGRLVAMTGDGTNDAPALAQADVAVAMNSGTQAAKEAGNMVDLDSNPTKLIEVVHIGKQMLMTRGSLTTFSIANDVAKYFAIIPAAFAATYPQLNALNVMGLHSPNSAILSAVIFNALIIIFLIPLALKGVSYKPLSASAMLRRNLWIYGLGGLVVPFIGIKVIDVLLTLLDLA

SEQ ID NO: 13889 - protein, 198 aa, Salmonella typhi
MRCMMIGLRPAFSTMLFLLLLTGGVYPLLTTALGQWWFPWQANGSLIHKDNLIRGSALIGQSFTAAGYFHGRPSATADTPYNPLASGGSNLAASNPELDAQIQARVAALRAANPQASSAVPVELTTASASGLDNNLTPGAAAWQIPRVAAARQLPVEQVAQLVAEYTHRPLASFLGQPVVNIVELNLALDALQGHRAK

SEQ ID NO: 13890 - protein, 731 aa, Salmonella typhi
  VARIANT (1)...(731): Xaa = Any Amino Acid
MPLMKSYWSICRPTICANGSTKVKCISPVRRNALLNIFXXKGNLIALRELALRRTADRVDDQMRAWRAHPGEEKVWHTRDAILLCIGHNTGSEKLVRTAARLASRLGSVWHAVYVETPTLHRLPEKQRRAILSALRLAQELGAETATLSDPAEEKAVVRYAREHNLGKIVMGRPASRRWWRRDAFADRLARRAPDLDQVIVALEEPPARALAQTPDNRPFKEKWRGQIQGCLVAVALCAITTFIAMQWLVTFDAANLVMLYLLGVVVIALLYGRWPSVVATVINVASFDLFFIAPRGTLAVSDVQYLLTFAVMLTVGLVIGNLTAGVRYQARVARYREQRTRHLYEMSKALAVGRSEHDIAATSERFIASTCQARSQILLPDTNGKLLPLTHQQGMTPWDDAIARWSFDKGQPAGAGTDTLPGVPYQILPLKSADKTYGLAIVEPGNLRQLMVPEQQRLLETFTLLVANALERLTLTASEEQARLASEEQARLASERESIRNALLAALSHDLRTPLTVLFGQAEILTLDLASAGSPHARQASEIRQHILNTTRLVNNLLDMARIQSGGFNLKKEWLTLEEVVGSALQMLEPGLLHPITLSLPQQLTLIHVDGPLFERVLINLLENAVKYAGPQASIGIDAAVKDNRLQLDVWDNGPGIPAGQEQKIFDKFARGNKESAVPGVGLGLAICHAIVEVHGGTLTAYNRPQGGACFRVTLPQGKPPELDDFHEDM

SEQ ID NO: 13891 - protein, 244 aa, Salmonella typhi
MNIDLNADLGEGCASDSELLTLVSSANIACGFHAGDAQTMLTCVREALKNGVAIGAHPSFPDRDNFGRTAMVLPPETVYAQTLYQIGALGAIVQAQGGVMRHVKPHGMLYNQAAKDPHLAQAIAKAVHDYDPSLILVGLAGSELIRAGERHRLVTRQEVFADRGYQADGSLVPRMQPGALIHDEEQALAQTLDMVQAGRVKSVTGVWTTVTAQTVCIHGDGEYALAFARRLRAAFNARNVHVIA

SEQ ID NO: 13892 - protein, 395 aa, Salmonella typhi
MELCMPLALFALTISAFAIGTTEFVIVGLVPTIAQQLAVSLPSAGMLVLIYALGVAIGAPVLTALTGRLPRKQLLVALMVLFTAGNLLAWQAPGYMTLIAARLLTGLAHGVFFSIGSTIATSLVPKEKAASAIAIMFGGLTVALVTGVPLGTFIGQHFGWRETFLAVSLLGVIALMSSQLLIPANIPGRAAASIRDQVKVLTHPRLLLIYAVTALGYGGVFTAFTFLAPMMQDLAGFSPAAVSWILLGYGVSVAIGNIWGGKLADKHGAVPALKFIFAALFVLLMVFQVTASTQYAALATILVMGIFAFGNVPGLQVYVVQKAEQFTPNAVDVASGLNIAAFNIGIALGSVIGGQTVAHYGLAQTPWIGALIVLVAFLLMGVSGRLDKPVRIALE

SEQ ID NO: 13893 - protein, 178 aa, Salmonella typhi
MSMKKYLAMITGSLLVSSSAMAVSDNTITFQGEVSDETCSVVINGNQAKPVVLLPTVSTKELSEQGKTAGPITFDIGLSGCTGSKDKTTKISTVFVGNQVTSNGNLGNTGSAKNVEVQLLDTSGEPINLTGGFTGDGDLQLEPNASEASATYTARYYSTGKAEAGTVAATLQYAVSYK

SEQ ID NO: 13894 - protein, 389 aa, Salmonella typhi
MTDTTILQNNTHVIKPKKSVALSGVPAGNTALCTVGKSGNDLHYRGYDILDLAEHCEFEEVAHLLIHGKLPTRDELNAYKSKLKALRGLPANVRTVLEALPAASHPMDVMRTGVSALGCTLPEKEGHTVSGARDIADKLLASLSSILLYWYHYSHNGERIQPETDDDSIGGHFLHLLHGEKPTQSWEKAMHISLVLYAEHEFNASTFTSRVIAGTGSDVYSAIIGAIGALRGPKHGGANEVSLEIQQRYETPDEAEADIRKRVENKEVVIGFGHPVYTIADPRHQVIKRVAKQLSEEGGSLKMYHIADRLETVMWETKKMFPNLDWFSAVSYNMMGVPTEMFTPLFVIARVTGWAAHIIEQRQDNKIIRPSANYTGPEDRVFVPIEKRC

SEQ ID NO: 13895 - protein, 324 aa, Salmonella typhi
  VARIANT (1)...(324): Xaa = Any Amino Acid
MTDLIHRPRRLRKSAALRAMFEETTLSLNDLVLPIFVEEELDDYKAIDAMPGVMRIPEKQLAREIERIANAGIRSVMTFGISHHTDDTGSDTWKEDGLVARMSRICKQTVPEMIVMSDTCFCEYTSHGHCGVLCEHGVDNDATLANLGKQAVIAAAAGADFIAPSAAMDGQVQAIRQALDAAGFTDTAIMSYSTKFASSXYGPFREAAGTALKGDRKTYQMNPMNRREAIRESLLDEAQGADCLMVKPAGAYLDVLREIRERTELPLGAYQVSGEYAMIKFAAMAGAIDEEKVVLESLGSIKRAGADLIFSYFALDLAEKNILR

SEQ ID NO: 13896 - protein, 370 aa, Salmonella typhi
MEWVFKMAKLRVGIVFGGKSAEHEVSLQSAKNIVDAIDKTRFDVVLLGIDKAGQWHVNDAENYLQNADDPAHIALRPSAISLAQVPGKHQHQLINAQNGQPLPTVDVIFPIVHGTLGEDGSLQGMLRVANLPFVGSDVLSSAACMDKDVAKRLLRDAGLNIAPFITLTRTNRHAFSFAEVESRLGLPLFVKPANQGSSVGVSKVANEAQYQQAVALAFEFDHKVVVEQGIKGREIECAVLGNDNPQASTCGEIVLNSEFYAYDTKYIDDNGAQVVVPAQIPSEVNDKIRAIAIQAYQTLGCAGMARVDVFLTADNEVVINEINTLPGFTNISMYPKLWQASGLGYTDLISRLIELALERHTANNALKTTM

SEQ ID NO: 13897 - protein, 319 aa, Salmonella typhi
MSLNFLDFEQPIAELEAKIDSLTAVSRQDEKLDINIDEEVHRLREKSVELTRKIFADLGAWQVAQLARHPQRPYTLDYVRLAFDEFDELAGDRAYADDKAIVGGIARLEGRPVMIIGHQKGRETKEKIRRNFGMPAPEGYRKALRLMEMAERFNMPIITFIDTPGAYPGVGAEERGQSEAIARNLREMSRLNVPVICTVIGEGGSGGALAIGVGDKVNMLQYSTYSVISPEGCASILWKSADKAPLAAEAMGIIAPRLKELKLIDSIIPEPLGGAHRNPEAMAASLKAQLLEDLADLDVLSTDDLKNRRYQRLMSYGYA

SEQ ID NO: 13898 - protein, 582 aa, Salmonella typhi
  VARIANT (1)...(582): Xaa = Any Amino Acid
MRSFNWNRNNMRTSQYLLSTLKETPADAEVISHQLMLRAGMIRKLASGLYTWLPTGLRVLKKVENIVREEMNNAGAIEVSMPVVQPADLWQESGRWEQYGPELLRFVDRGERPFVLGPTHEEVITDLVRNELSSYKQLPLNFFQIQTKFRDEVRPRFGVMRSREFLMKDAYSFHTSQESLQETYDAMYAAYSRIFSRMGLDFRAVQADTGSIGGNASHEFQVLAQSGEDDIVFSDVSDYAANIELAEAIAPQTPRAAATQEMTLVDTPNAKTIAELVEQFNLPIEKTVKTLLVKAVKDSKSPLVALLVRGDHELNEVKAEKLPHVASPLTFATEEEIRAVINAGPGSLGPVNMPIPVIIDRTVAAMSDFAAGANIDGKHYFGINWDRDVATPVVADIRNVVAGDPSPDGQGTLLIKRGIEVGHIFQLGTKYSEALKASVQGEDGRNQILTMGCYGIGVTRVVAAAIEQNFDERGIVWPDAIAPFQVAILPMNMHKSFRVQELAEKLYSELRAQGIEVLMDDRKERPGVMFADMELIGIPHTIVIGDRNLDNDDIEYKYRRSGEKSLIKTGDIVDYLVKAIKG

SEQ ID NO: 13899 - protein, 254 aa, Salmonella typhi
  VARIANT (1)...(254): Xaa = Any Amino Acid
MAYSKIRQPKLSDVIEQQLEFLILEGTLRPGEKLPPERELAKQFDVSRPSLREAIQRLEAKGLLLRRQGGGTFVQSSLWQSFSDPLVELLSDHPESQFDLLETRHALEGIAAYYAALRSTDEDKDRIRELHHAIELAQESGDLDAESEAVLQYQIAVTEAAHNVVLLHLLRCMEPMLAXNVRQNFELLYARREMLPLVSTHRTRIFEAIMAGKPEEAREASHRHLAXIEEIMLDRSREESRRERAXRRLEQRKN

SEQ ID NO: 13900 - protein, 475 aa, Salmonella typhi
  VARIANT (1)...(475): Xaa = Any Amino Acid
MMSTEIKTQVVVLGAGPAGYSAAFRCADLGLETVIVERYNTLGGVCLNVGCIPSKALLHVAKVIEEAKALAEHGIVFGEPKTDIDKIRTWKEKVITQLTGGLAGMAKGRKVKVVNGLGKFTGANTLEVEGENGKTVINFDNAIIAAGSRPIQLPFIPHEDPRVWDSTDALELKEVPKRMLVMGGGIIGLEMGTVYHALGSEIDVVEMFDQVIPAADKDIVKVFTKRISKKFNLMLETKVTAVEAKEDGIYVSMEGKKAPAEAQRYDAVLVAIGRVPNGKNLDAGKAGVEVDDRGFIRVDKQLRTNVPHIFAIGDIVGQPMLAHKGVHEGHVAAEVIAGKKHYFDPKVIPSIAXTEPXXAWVGLTEKEAKEKGISYETATFPWAASGRAIASDCADGMTKLIFDKESHRVIGGAIVGTNGGELLGEIGLAIEMGCDAEDIALTIHAHPTLHESVGLAAEIFEGSITDLPNPKAKKK

SEQ ID NO: 13901 - protein, 901 aa, Salmonella typhi
MLIKLLTKVFGSRNDRTLRRMRKAVSLINAMEPEMEKLSDDELKAKTNEFRARIGKGESVESLIPEAFAVVREASKRVFGMRHFDVQLLGGMVLNDRCIAEMRTGEGKTLTATLPAYLNALSGKGVHVVTVNDYLAQRDAENNRPLFEFLGMSVGINLPGMPAPAKREAYAADITYGTNNEYGFDYLRDNMAFSPEERVQRKLHYALVDEVDSILIDEARTPLIISGPAEDSSEMYKKVNKIIPHLIRQEKEDSDTFQGEGHFSVDEKARQVNLTERGLVLIEELLVQEGIMDEGESLYSPGNIMLMHHVTAALRAHALFTRDVDYIVKDGEVIIVDEHTGRTMQGRRWSDGLHQAVEAKEGVEIQNENQTLASITFQNYFRLYEKLAGMTGTADTEAFEFSSIYKLDTVVVPTNRPMIRKDLPDLVYITEAEKIQAIIEDIKERTANGQPVLVGTISIEKSEVVSRELTKAGIKHNVLNAKFHANEAGIVAQAGYPAAVTIATNMAGRGTDIMLGGSWQAEVAALEAPTEEQIAQIKADWQVRHDAVLAAGGLHIIGTERHESRRIDNQLRGRSGRQGDPGSSRFYLSMEDALMRIFASDRVSGMMRKLGMKPGEAIEHPWVTKAIANAQRKVESRNFDIRKQLLEYDDVANDQRRAIYTQRNELLDVSDVSDTINSIREDVFKATIDAYIPPQSLEEMWDIPGLQERLKNDFDLEMPIAEWLDKEPELHEETLRERILAQSIEVYQRKEEVVGAEMMRHFEKGVMLQTLDSLWKEHLAAMDYLRQGIHLRGYAQKDPKQEYKRESFAMFAAMLESLKYEVISTLSKVQVRMPEEVEAMEMQRREEAERLAQMQQLSHQDDDAAVAADLAAQTGERKIGRNDPCPCGSGKKYKQCHGRLS

SEQ ID NO: 13902 - protein, 269 aa, Salmonella typhi
  VARIANT (1)...(269): Xaa = Any Amino Acid
MAGEVMSKPTTIAVLQKCKQEKKRFATITAYDYSFAKLFADEGINVMLVGDSLGMTIXGHDSTLPVTVEDIAYHTRAVRRGAPNCLLLSDLPFMAYATPEQAFENAAIVMRAGANMVKIEGGAWLVDTVKMLTERAVPVCGHLGLTPQSVNIFGGYKIQGRGDAGQILLDDALALEAAGAQLLVLECVPVELAKRVTEALSIPVIGIGAGNVTDGQILVMHDAFGITGGHIPKFAKNFLAEAGDMRAAVRQYMAEVESGVYPGEEHSFH

SEQ ID NO: 13903 - protein, 329 aa, Salmonella typhi
  VARIANT (1)...(329): Xaa = Any Amino Acid
MQYRTLGANGPRVSAIGLGCMGMSAFYGAHDDSTSIKTLHYALDQGVTLLDTADMYGPYTNERLVGRAIADRRDRVFLATKFGIVLDPANPMARGVNGRPEYVRRSCEQSLQRLXVDHIDLYYQHRVDPSVPIEETVGAMADLVREGKVRYLGLSEASTQTLERAHNVHPITALQSEYSLWSREAEISALSTCERLGIGFVAYSPLGRGFLTGTIKTPEDFAANDFRRTNPRFMGENFSRNLRLAEAIKQMAREKECTPAQLALAWLLARNRHLVPIPGTRHCARVDENLGALSLTLSPQELAAIEAVFPHDAAAGPRYWPEIMSTLNR

SEQ ID NO: 13904 - protein, 846 aa, Salmonella typhi
MLRRKSMAGNDREPIGRKGKPSRPVKQKVSRRRQHDDDYDDDYEDEEPMPRKGKGKGRKPRGKRGWLWLLLKLFIVFVVLFAIYGVYLDQKIRSRIDGKVWQLPAAVYGRMVNLEPDMPVSKNEMVKLLEATQYRLVTKMTRPGEFTVQANSIEMIRRPFDFPDSKEGQVRARLTFSDGRLETIVNLDNNRQFGFFRLDPRLITMLSSPNGEQRLFVPRSGFPDLLVDTLLATEDRRFYEHDGISLYSIGRAVLANLTAGRTVQGASTLTQQLVKNLFLSSERSYWRKANEAYMALIMDARYSKDRILELYMNEVYLGQSGDNEIRGFPLASLYYFGRPVEELSLDQQALLVGMVKGASIYNPWRNPKLALERRNLVLRLLQQQKIIDQELYDMLSARPLGVQPRGGVISPQPAFMQMVRQELQAKLGDKIKDLSGVKIFTTFDSVAQDAAEKAVVEGIPALKKQRKLSDLETAMVVVDRFSGEVRAMVGGAEPQYAGYNRAMQARRSIGSLAKPATYLTALSQPNLYRLNTWIADAPISLRQPNGQVWSPENDDRRYSESGKVMLVDALTRSMNVPTVNLGMALGLPAVTDTWTKLGVPKDQLNPVPAMLLGALNLTPIEVAQAFQTIASGGNRAPLSALRSVIAEDGKVLYQSYPQAERAVPAQAAYLTLWTMQQVVQRGTGRQLGAKYPGLHLVGKTGTTNNNVDTWFAGIDGSQVTITWVGRDNNQPTKLYGASGAMAIYQRYLANQTPTPLVLTPPEDVVDMGVDYDGNFVCNGGMRTLPVWTDDPNTLCQQGEMMQQQQQPSGNPFDQSSQPQQPAQQQPPKEEKSDGVAGWIKEMFGGN

SEQ ID NO: 13905 - protein, 296 aa, Salmonella typhi
MRELYPLTRRRLLTAMALSPLLWQMNTAQAAAIDPRRIVALEWLPVELLLALGITPYGVADVPNYKLWVSEPPLPDSVIDVGLRTEPNLELLTEMKPSFMVWSAGYGPSPEKLARIAPGRGFDFSDGKKPLAVARRSLVELAQTLNLEAAAEKHLAQYDRFIASQKPRFIRRGGRPLLMTTLIDPRHMLVLGPNCLFQEVLDEYGIVNAWQGETNFWGSTAVSIDRLAMYKEADVICFDHGNSTDMNALMATPLWQAMSFVRAGRFHRVPAVWFYGATLSTMHFVRILNNVLGGKA

SEQ ID NO: 13906 - protein, 426 aa, Salmonella typhi
  VARIANT (1)...(426): Xaa = Any Amino Acid
MSKSENLYSAARELIPGGVNSPVRAFTGVGGTPLFIEKADGAYLYDVDGKAYIDYVGSWGPMVLGHNHPAIRNAVIEAAERGLSFGAPTEMEVKMAELVTNLVPTMDMVRMVNSGTEATMSAIRLARGFTGRDKIIKFEGCYHGHADCLLVKAGSGALTLGQPNSPGVPADFAKHTLTCTYNDLTSVRAAFEQYPQEIACIIVEPVAGNMNCVPPLPEFLPGLRALCDEFGALLIIDEVMTGFRVALAGAQDYYGVVPDLTCLGKIIGGXMPVGAFGGRRDVMDALAPTGPVYQAGTLSGNPIAMAAGFACLNEVAQPGIHETLDELTTRLAEGLLEAAEEANIPLVVNHVGGMFGIFFTDAESVTCYQDVMACDVERFKRFFHLMLEEGVYLAPSAFEAGFMSVAHSMDDINNTIDAARRVFAKL

SEQ ID NO: 13907 - protein, 241 aa, Salmonella typhi
  VARIANT (1)...(241): Xaa = Any Amino Acid
MATVSMRDMLKAGVHFGHQTRYWNPKMKPFIFGARNKVHIINLEKTVPMFNEALAELNKISARKGKILFVGTKRAASEAVKEAANSCDQFFVNHRWLGGMLTNWKTVRQSIXRLKDLETQSQDGTFEKLTKXEALMRTRELEKLENSLGGIKDMGGLPDXLFVIDADHEHIAIKEANNLGIPVFAIVDTNSDPDGVDFVIPGNDDAIRAVSLYLGAVAATVREGRSQDLASQAEESFVEAE

SEQ ID NO: 13908 - protein, 307 aa, Salmonella typhi
  VARIANT (1)...(307): Xaa = Any Amino Acid
MAPFFTFISVRFDAGQIKSFEDFRMAEITASLVKELRERTGAGMMDCKKALTEANGDIELAIENMRKSGAIKAANKAXNVAADGVIKTKIDGNVAFILEVNCQTDFVAKDAGFQAFADKVLDAAVAGKITDVEVLKAQFEEERVALVAKIGENINIRRVASLEGDVLGSYQHGARIGVLVAAKGADEELVKQLAMHVAASKPEFVKPEDVSADVVEKEYQVQLDIAMQSGKPKEIAEKMVEGRMKKFTGEVSLTGQPFVMEPSKSVGQLLKEHNADVTGFIRFEVGEGIEKVETDFAAEVAAMSKQS

SEQ ID NO: 13909 - protein, 185 aa, Salmonella typhi
MISDIRKDAEVRMEKCVEAFKTQISKVRTGRASPSLLDGIVVEYYGTPTPLRQLASVTVEDSRTLKINVFDRSMGPAVEKAIMASDLGLNPSSAGTDIRVPLPPLTEERRKDLTKIVRGEAEQARVAVRNVRRDANDKVKALLKDKAISEDDDRRSQEEVQKMTDAAIKKVDAALADKEAELMQF

SEQ ID NO: 13910 - protein, 252 aa, Salmonella typhi
MLSATQPVSENLPAHGCRHVAIIMDGNGRWAKKQGKIRAFGHKAGAKSVRRAVSFAANNGIDALTLYAFSSENWNRPAQEVSALMELFVWALDSEVKSLHRHNVRLRIIGDISRFNSRLQERIRKSEALTAHNTGLTLNIAANYGGRWDIVQGVRQLAELVQAGVLRPDQIDEERLGQQICMHELAPVDLVIRTGGEHRISNFLLWQIAYAELYFTDVLWPDFDEQDFEGALHAFANRERRFGGTEPGDDKA

SEQ ID NO: 13911 - protein, 123 aa, Salmonella typhi
  VARIANT (1)...(123): Xaa = Any Amino Acid
MLDFEEGRFLRAVKNVSVNEPFFQGHFPGKPILPGVLILEAMAQATGILAFKSVGKLEPGELYYFAGIDEXRFKRPXVPGDQMIMEVTFXKTRRGLTRFKGXALXDGKVXCEATMMCARSREA

SEQ ID NO: 13912 - protein, 382 aa, Salmonella typhi
  VARIANT (1)...(382): Xaa = Any Amino Acid
MAAQRPLTIALXAGETSGDILGAXLIRALKARVPNARFVGXAGPRMQAEXCEAXYEMEXLAVMGIVEVLGRLRRLLHIRADLTRRFTELKPDVFVGIDAPDFNITLEGNLKKQGIKTIHYVSPSVWAWRQKRVFKIGRSTHMVLAFLPFEKAFYDKFNVPCRFIGHTMADAMPLDPDKNAARDVLGIPHDAHCLALLPGSRGAEVEMLSADFLKTAQLLRQRYPDLEVVVPLVNAKRREQFEKIKAEVAPDLAVHLLDGMAREAMIASDAALLASGTAALECMLAKCPMVVGYRMKPFTFWLAKRLVKTEYVSLPNLLAGRELVKELLQEECEPQKLAEALLPLLANGKTSHAMHDTFRELHQQIRCNADEQAADAVLELAQ

SEQ ID NO: 13913 - protein, 1160 aa, Salmonella typhi
  VARIANT (1)...(1160): Xaa = Any Amino Acid
MSEPRFVHLRVHSDYSMIDGLAKTGPLVXXAXSLXMPALAIXDFTNLCGLVKFYGAXHGAGIXPXVXADFNVHNXLLGDELTHLTVLAANNTGYQNLTLLISKAYQRGYGAAGPIIERDWLVELKEGLILLSGGRMGDVGRCLLRGNQALVEECVAFYEAHFPDRYFLELIRTGRQDEETYLHAAVELAEARGLPVVATNDVRFLESDDFDAHEIRVAIHDGFTLDDPKRPRNYSPQQYMRSEEEMCELFSDIPEALENTVEIAKRCNVTVRLGEYFLPQFPTGDMTTEDYLVKKSKEGLEERLAFLFPDEEERKKRRPEYDERLDIELQVINQMGFPGYFLIVMEFIQWSKDNGVPVGPGRGSGAGSLVAYALKITDLDPLEFDLLFERFLNPERVSMPDFDVDFCMEKRDQVIEHVADMYGRDAVSQIITFGTMAAKAVIRDVGRVLGHPYGFVDRISKLVPPDPGMTLAKAFEAEPQLPEIYEADEEVRALIDMARKLEGVTRNAGKHAGGVVIAPTKITDFAPLYCDEEGKHPVTQFDKSDVEYAGLVKFDFLGLRTLTIINWALEMINKRRAKNGEPPLDIAAIPLDDKKSFDMLQRSETTAVFQLESRGMKDLIKRLQPDCFEDMIALVALFRPGPLQSGMVDNFIDRKHGREELSYPDVQWQHESLKPVLEPTYGIILYQEQVMQIAQVLSGYTLGGADMLRRAMGKKKPEEMAKQRSVFEEGAKKNGIDGELAMKIFDLVEKFAGYGFNKSHSAAYALVSYQTLWLKAHYPAEFMAAVMTADMDNTEKVVGLVDECWRMGLKILPPDINSGLYHFHVNDEGEIVYGIGAIKGVGEGPIEAIIDARNQGGYFRELFDLCARTDTKKLNRRVLEKLIMSGAFDRLGPHRAALMNSLGDALKAADQHAKAEAIGQADMFGVLAEEPEQIEQSYASCQPWPEQVVLDGERETLGLYLTGHPINQYLKEIERYVGGVRLKDMHPTERGKVTTAAGLVIAARVMVTKRGNRIGICTLDDRSGRLEVMLFTDALDKYQQLLEKDRILIVSGQVSFDDFSGGLKMTAREVMDIDEAREKYARGLAISLTDRQIDDQLLNRLRQSLEPHRSGTIPVHLYYQRADARARLRFGATWRVSPSDRLLNDLRGLIGSEQVELEFD

SEQ ID NO: 13914 - protein, 347 aa, Salmonella typhi
  VARIANT (1)...(347): Xaa = Any Amino Acid
MRIEEDLKLGFKDVLIRPKRSTLKSRSDVELERQFTFKHSGQTWSGVPIIAANMDTVGTFEMAQALAGFDILTAVHKHYSVEEWAAFINTASADVLKHVMVSTGTSDADFEKTVQILALNPALNFVCIDVANGYSEHFVQFVAKAREAWPSKTICAGNVVTGEMCEELILSGADIVKVGIGPGSVCTTRVKTGVGYPQLSAVIECADAAHGLGGMIVSDGGCTMPGDVAKAFGGGADFVMLGGMLAGHEESGGSVVEENGEKFMLFYGMSSESAMNRHVGGVAKYRAAEGKTVKLPLRGPVGNTARDILGGLRSACTYVGASRLKELTKRTTFIRVQEQENRXFNSL

SEQ ID NO: 13915 - protein, 354 aa, Salmonella typhi
MRVTDFSFELPESLIAHYPQPERSRCRLLSLEGPTGALTHGTFTDLLDKLNPGDLLVFNNTRVIPARLFGRKASGGKIEVLVERMLDDKRILAHIRASKAPKPGTELLLGDDESIHATMTARHGALFEVEFNDPRPVLDILNAIGHMPLPPYIDRPDEDADRELYQTVYSEKPGAVAAPTAGLHFDEPLLAALREKGVEMAFVTLHVGAGTFQPVRVDTIEDHIMHSEYAEVPQEVVDAVLAAKARGNRVIAVGTTSVRSLESAAQAAKSDLIEPFFGDTQIFIYPGYQYKVIDALITNFHLPESTLIMLVSAFAGYQHTMNAYKTAVEQKYRFFSYGDAMFITCNPQAISERP

SEQ ID NO: 13916 - protein, 377 aa, Salmonella typhi
MIMKFELDTTDGRARRGRLVFDRGVVETPAFMPVGTYGTVKGMTPEEVEATGAQIILGNTFHLWLRPGQEIMKLHGDLHDFMQWKGPILTDSGGFQVFSLGDIRKITEQGVHFRNPINGDPIFLDPEKSMEIQYDLGSDIVMIFDECTPYPADWDYAKRSMEMSLRWAKRSRDRFDSLGNKNALFGIIQGSVYEDLRDISVKGLVEIGFDGYAVGGLAVGEPKADMHRILEHVCPQIPADKPRYLMGVGKPEDLVEGVRRGIDMFDCVMPTRNARNGHLFVTDGVVKIRNAKHKSDISPLDAECDCYTCRNYSRAYLHHLDRCNEILGARLNTIHNLRYYQRLMAGLRKAIEEGKLESFVTEFYQRQGRPVPPLNVD

SEQ ID NO: 13917 - protein, 439 aa, Salmonella typhi
MTHQLKSRDIIALGFMTFALFVGAGNIIFPPMVGLQAGEHVWTAAIGFLITAVGLPVLTVVALAKVGGGVDSLSTPIGKVAGLLLATVCYLAVGPLFATPRTATVSFEVGIAPLTGDSAMPLLIYSVVYFAIVILVSLYPGKLLDTVGNFLAPLKIIALVILSVAAIVWPAGPISNALDAYQNAAFSNGFVNGYLTMDTLGAMVFGIVIVNAARSRGVTEARLLTRYTVWAGLMAGVGLTLLYLALFRLGSDSATLVDQSANGAAILHAYVQHTFGGAGSFLLAALIFIACLVTAVGLTCACAEFFAQYIPLSYRTLVFILGGFSMVVSNLGLSHLIQISIPVLTAIYPPCIALVVLSFTRSWWHNSTRIIAPAMFISLLFGILDGIKASAFGDMLPAWSQRLPLAEQGLAWLMPTVVMVILAIIWDRAAGRQVTSSAH

SEQ ID NO: 13918 - protein, 463 aa, Salmonella typhi
MLIGQKLMESNNKLKRGLSTRHIRFMALGSAIGTGLFYGSADAIKMAGPSVLLAYIIGGVAAYIIMRALGEMSVHNPAASSFSRYAQENLGPLAGYITGWTYCFEILIVAIADVTAFGIYMGVWFPAVPHWIWVLSVVLIICAINLMSVKMFGELEFWFSFFKVATIIIMIVAGIGIIVWGIGNGGQPTGIHNLWSNGGFFSNGWLGMIMSLQMVMFAYGGIEIIGITAGEAKDPEKSIPRAINSVPMRILVFYVGTLFVIMSIYPWNQVGTNGSPFVLTFQHMGITFAASILNFVVLTASLSAINSDVFGVGRMLHGMAEQGSAPKVFAKTSRRGIPWVTVLVMTIALLFAVYLNYIMPENVFLVIASLVTFATVWVWIMILLSQIAFRRRLPPEEVKALKFKVPGGVVTTIAGLIFLVFIIALIGYHPNTRISLYVGFAWIVLLLIGWIFKRRRDRQLAQA

SEQ ID NO: 13919 - protein, 270 aa, Salmonella typhi
MAIKLIAIDMDGTLLLPDHTISPAVKNAIAAAREKGVNVVLTTGRPYAGVHSYLKELHMEQPGDYCITYNGALVQKAGDGSTVAQTALSYDDYRYLEKLSREVGSHFHALDRNTLYTANRDISYYTVHESYVATIPLVFCEAEKMDPNTQFLKVMMIDEPAVLDRAIARIPAEVKEKYTVLKSAPYFLEILDKRVNKGTGVKSLAEALGIKPEEVMAIGDQENDIAMIEYAGMGVAMDNAIPSVKEVANFVTKSNLEDGVAWAIEQHVLS

SEQ ID NO: 13920 - protein, 804 aa, Salmonella typhi [sequence omitted]

SEQ ID NO: 13921 - protein, 366 aa, Salmonella typhi
MKFTVEREHLLKPLQQVSGPLGGRPTLPILGNLLLQVADGTLSLTGTDLEMEMVARVTLSQPHEPGATTVPARKFFDICRGLPEGAEIAVQLEGDRMLVRSGRSRFSLSTLPAADFPNLDDWQSEVEFTLPQATMKRLIEATQFSMAHQDVRYYLNGMLFETEGSELRTVATDGHRLAVCSMPLEASLPSHSVIVPRKGVIELMRMLDGGENPLRVQIGSNNIRAHVGDFIFTSKLVDGRFPDYRRVLPKNPDKHLEAGCDILKQAFARAAILSNEKFRGVRLYVSENQLKITANNPEQEEAEEILDVSYGGTEMEIGFNVSYVLDVLNALKCETVRIMLTDSVSSVQIEDAASQSAAYVVMPMRL

SEQ ID NO: 13922 - protein, 265 aa, Salmonella typhi
  VARIANT (1)...(265): Xaa = Any Amino Acid
MQPDLHCRTLAAHTLKHFRALSPLTHCMTNDVVQTFTANTLLALGASPAMVIDPVEARPFAAIANALLINVGTLTASRADAMRAAVESAYDAKTPWTLDPVAVGALEFRRRFCXDLLSLRPAAIRGNASEILALSGMALGGRGVDTTEAALAAXPAAQALARQIDCIVVVTGEIDYVTNGQRTLSIPGGDPLMTRIVGTGCALSAVVAASCALPGAALDNVASACCWMKLAGQVAAERSEGPGSFIPAFLDALYHLDMEAANATN

SEQ ID NO: 13923 - protein, 454 aa, Salmonella typhi
MSHNDTIVAQATPPGRGGVGILRISGLKARDVAQEVLGKLPKPRYADYLPFKDVDGSALDQGIALWFPGPNSFTGEDVLELQGHGGPVILDLLLKRILTLPGVRIARPGEFSERAFLNDKLDLAQAEAIADLIDASSEQAARSALNSLQGAFSARVNHLVEALTHLRIYVEAAIDFPDEEIDFLSDGKIEAQLNGVIADLDAVRTEARQGSLLREGMKVVIAGRPNAGKSSLLNALAGREAAIVTDIAGTTRDVLREHIHIDGMPLHIIDTAGLRDANDEVERIGIERAWQEIEQADRVLFMVDGTTTDAVDPADIWPDFIARLPKNLPITVVRNKADITGETLGISEVNGHSLVRLSARTGEGVDVLRNHLKQSMGFDTNMEGGFLARRRHLQALAEAANHLEQGKAQLLGAWAGELLAEELRLAQQSLSEITGEFTSDDLLGRIFSSFCIGK

SEQ ID NO: 13924 - protein, 319 aa, Salmonella typhi
MAATKPAFNPPGKKGDMIFSALVKLAALIVLLMLGGIIVSLIISSWPSIQKFGFSFLWTKEWDAPNDIYGALVPIYGTLVTSFIALLIAVPVSFGIALFLTELAPGWLKRPLGIAIELLAAIPSIVYGMWGLFIFAPLFATYFQEPVGNILSNIPFVGALFSGPAFGIGILAAGVILAIMIIPYIAAVMRDVFEQTPVMMKESAYGIGCTTWEVIWRIVLPFTKNGVIGGIMLGLGRALGETMAVTFIIGNTYQLDSASLYMPGNSITSALANEFAEAESGLHVAALMELGLILFVITFIVLAASKFMIMRLAKNEGAR

SEQ ID NO: 13925 - protein, 704 aa, Salmonella typhi
MPLSIGAVITILVLSKPFFTTEEVIPTMTQVAKKILVTCALPYANGSIHLGHMLEHIQADVWVRYQRMRGHEVNFICADDAHGTPIMLKAQQLGITPEQMIGEMSQEHQTDFAGFNISYDNYHSTHSDENRELSELIYTRLKENGFIKNRTISQLYDPEKGMFLPDRFVKGTCPKCKSADQYGDNCEVCGATYSPTELIEPKSVVSGATPVMRDSEHFFFDLPSFSEMLQAWTRSGALQEQVANKMQEWFESGLQQWDISRDAPYFGFEIPNAPGKYFYVWLDAPIGYMGSFKNLCDKRGDTTSFDEYWKKDSDAELYHFIGKDIVYFHSLFWPAMLEGSHFRKPTNLFVHGYVTVNGAKMSKSRGTFIKASTWLKHFDADSLRYYYTAKLSSRIDDIDLNLEDFVQRVNADIVNKVVNLASRNAGFINKRFDGVLAAELADPQLYKTFTDAAAVIGEAWESREFGKAIREIMALADVANRYVDEQAPWVVAKQEGRDADLQAICSMGINLFRVLMTYLKPVLPTLSERVEAFLNSELNWDAIEQPLLSHKVNTFKALYNRIDMKQVEALVEASKEEVKAAAAPVTGPLADFPIQETITFDDFAKIDLRVALIENAEFVDGSDKLLRLTLDLGGEKRNVFSGIRSAYPDPQALIGRQTVMVANLAPRKMRFGVSEGMVMAAGPGGKDIFLLSPDDGAKPGQQVK

SEQ ID NO: 13926 - protein, 239 aa, Salmonella typhi
  VARIANT (1)...(239): Xaa = Any Amino Acid
MIKVLIVDDEPLARENLRILLQGQDDIEIVGECANAVEAIGAVHKLRPDVLFLDIQMPRISGLEIVGMLDPEHRPYIVFLTAFDEYAIKAFEEHAFDYLLKPIEEKRLEKTLHRLRQERSKQDVSLLPENQQALKFIPCTGHSRIYLLQMDDVAFVSSRMSGVYVTXXXXKEGFTELTLRTLESRTPLLRCHRQFLVNMAHLQEIRLEDNGQAELILRNGLTVPVSRRYLKSLKEAIGL

SEQ ID NO: 13927 - protein, 595 aa, Salmonella typhi
MIVFTNSYFYATVQRKLIVLNVCYALLIEVWFARMYEFNLVLLLLQQMCVFLVIAWLMSKTRLFIPLMQVTVRLPHKLLCYVMFSIFCIMGTYFGLHIEDSIANTRAIGAVMGGLLGGPVVGGLVGLTGGLHRYSMGGMTALSCMISTIVEGLLGGLVHSVLIRRGRPDKVFSPLTAGAITCVAELVQMLIILLIARPFDDALHLVSNIAAPMMMTNTVGAALFMRILLDKRAMFEKYTSAFSVTALKVAASTEGILRQGFNEVNSMKVAQVLYQELDIGAVAITDREKLLAFTGIGDDHHLPGKPISSGYTLKAIETGEVVYADGNEVPYRCSLHPQCKLGSTLVIPLRGENQRVMGTIKLYEAKNRLFSSINRTLGEGIAQLLSAQILAGQYERQKALLTQSEIKLLHAQVNPHFLFNALNTIKAVIRRDSEQASQLVQYLSTFFRKNLKRPSEIVTLADEIEHVNAYLQIEKARFQSRLQVQLDVPSTLSRQKLPAFTLQPIVENAIKHGTSQLLDTGNVAIRARREGQHLMLDIEDNAGLYQPSAGSSGLGMSLVDKRLREHFGDDYGISVACEPDCFTRITLRLPLEEDA

SEQ ID NO: 13928 - protein, 454 aa, Salmonella typhi
MMFKPELLSPAGTLKNMRYAFAYGADAVYAGQPRYSLRVRNNEFNHENLQLGINEAHALGKKFYVVVNIAPHNAKLKTFIRDLKPVVEMGPDALIMSDPGLIMLVREHFPAMPIHLSVQANAVNWATVKFWQQMGLTRVILSRELSLEEIEEIRQQVPDMEIEIFVHGALCMAYSGRCLLSGYINKRDPNQGTCTNACRWEYNVQEGKEDVVGNIVHKHEPIPVQNVEPTLGIGAPTDKVFMIEEAQRPGEYMTAFEDEHGTYIMNSKDLRAIAHVERLTKMGVHSLKIEGRTKSFYYCARTAQVYRKAIDDAAAGKPFDPTLLETLEGLAHRGYTEGFLRRHTHDDYQNYEYGYSVSERQQFVGEFTGERKGQLAAVAVKNKFSVGDSLELMTPQGNINFTLEQMENAKGDAMPVAPGDGYTVWMPVPQDVTLDYALLMRNFSGESTRNPHAK

SEQ ID NO: 13929 - protein, 316 aa, Salmonella typhi
MDTDMRVLLAPMEGVLDALVRELLTEVNDYDLCITEFVRVVDQLLPVKVFHRICPELLHASRTPSGTPVRIQLLGQHPQWLAENAARATALGSYGVDLNCGCPSKVVNGSGGGATLLTDPELIYQGAKAMRAAVPSHLPVTVKVRLGWDSGDRKFEIADAVQQAGASELVVHGRTKAQGYRAEHIDWQAIGEIRQRLTIPVIANGEIWDWQSAQACMATSGCDAVMIGRGALNIPNLSRVVKYNEPRMPWPEVVTLLQKYTRLEKQGDTGLYHVARIKQWLGYLRKEYIEATELFQSIRALNRSSEIARVIQAIKI

SEQ ID NO: 13930 - protein, 345 aa, Salmonella typhi
MSEINQNVKDSRQQYYQHISGQNLTPLWESLHHLVPQTPNANCAPAYWNYQEIRPLLMESGNVIGAKEAIRRVLVLENPALRGQSSITATLYAGLQLILPGEVAPSHRHNQSALRFIVEGKGAFTAVDGERTPMHTGDFILTPQWRWHDHGNPGSEPVVWLDGLDLPLVNLLGCGFAEDYPEDQQPVTRKEGDYLPRYAANMLPLRHQRGNSSPIFNYRYDRSREALHDLTRMGDPDEWEGYKLRYVNPVTGGYPMPSMGAFLQLLPKGFASRVARSTDSTIYHVVEGAGQVTIGNETFHFSAKDIFVAPTWHEVSFRSSEDTVLFSFSDKPVQEALGPFREARY

SEQ ID NO: 13931 - protein, 371 aa, Salmonella typhi
  VARIANT (1)...(371): Xaa = Any Amino Acid
MSWISILTRARVGTLSVSQMQMIEIAKAFSYNAKIVIMDEPTSSLTEKEVNHLFTIIRKLKERGCGIVYISHKMEEIFQLCDEITILRDGQWIATQPLEGLDMDKIIAMMVGRSLNQRFPDKENKPGDVILEVRHLTSLRQPSIRDVSFDLHKGEILGIAGLVGAKRTDIVETLFGIREKSSGTITLHGKKINNHTANEAINHGFALVTEERRSTGIYAYLDIGFNSLISNIRNYKNKVGLLDNSRMKSDTQWVIDSMRVKTPGHRAQIGSLSGGNQQKVIIGRWLLTQPEILMLDEPTRGIDVGAKFEIYQLIAELAKKGKGIIIISSXMPELLGITDRILVMSNGLVSGIVDTKTTTQNEILRLASLHL

SEQ ID NO: 13932 - protein, 489 aa, Salmonella typhi
  VARIANT (1)...(489): Xaa = Any Amino Acid
MGSKTKTTEAPALRRELKARHLTMIAIGGSIGTGLFVASGATISLAGPGGALFSYILIGLMVYFLMTSLGELAAYMPVSGSFATYGQNYVEEGFGFALGWNYWYNWAVTIAVDLVAAQLVMGWWFPDTPGWIWSALFLCVIFLLNYISVRGFGEAEYWFSLIKVATVIIFIIVGVAMIIGIFKGVEPVGWSNWTTGDAPFAGGFAAMIGVAMIVGFSFQGTELIGIAAGESENPEKNIPRAVRQVFWRILLFYVFAILIISLIIPYTDPNLLRNDVKDISVSPFTLVFQHAGLLSAAAIMNAVILTAVLSAGNSGMYASTRMLYTLACDGXAPRIFAKLSRGGVPRNALYATTVIAGLCFLTSMFGNQTVYLWLLNTSGMTGFIAWLGIAISHYRFRRGYVLQGYDVNDLPYRSGFFXLGPIFAFVLCLIITLGQNYEAFLKDTIDWGGVAATYIGIPLFLLIWFGYKLIKGTHFVRYSEMHFPERVKK

SEQ ID NO: 13933 - protein, 285 aa, Salmonella typhi
MKYIGAHVSAAGGLANAPARAAEIGATAFALFTKNQRQWRAAPLTPQVIDDFKIACEKYHFSAAQILPHDSYLINLGHPVSEALEKSRDAFLDEMQRCEQLGLTLLNFHPGSHLMQIAQEDCLARIAESINIALAQTEGVTAVIENTAGQGSNLGFEFEQLAAIIDGVEDKSRVGVCIDTCHAFAAGYDLRTPEACEKTFAEFGKIVGFQYLRGMHLNDAKSAFGSRVDRHHSLGEGNIGHDAFRWIMQDARFDGIPLILETINPDIWAEEIAWLKAQQIAEAMA

SEQ ID NO: 13934 - protein, 376 aa, Salmonella typhi
MFQLSVQDIHPGEQVGNKEEAIRQIAAALAQAGNVAGGYVDGMLAREQQTSTFLGNGIAIPHGTTDTRDQVLKTGVQVFQFPQGVTWGEGQVAYVAIGIAASSDEHLGLLRQLTHVLSDDSVAEQLKSATTAEELRALLMGEKQSEQLKLDNETMTLDVIASSLVTLQALNAARLKEAGAVDAAFVAKTINDSPMNLGQGIWLNDSAEGNLRSAVAVSRATQAFDVEGEKAALLVTVAMNDEQPIAVLKRLGDLLLNNKADRLLSADAATLLALLTSDDALTDDVLSAEFVVRNEHGLHARPGTMLVNTIKQFNSEITVTNLDGTGKPANGRSLMKVVALGVKKGHRLRFTAQGEDAEQALKAIGDAIAAGLGEGA

SEQ ID NO: 13935 - protein, 529 aa, Salmonella typhi
MTSPLLAIENLSVGFRQQQHVRPVVNAISLQVNAGETLALVGESGSGKSVTALSILRLLPTPPAVYLSGDIRFHGESLLHASEQTLRGVRGNKIAMIFQEPMVSLNPLHTLEKQLYEVLSLHRGMRREAARAEMIGCLDRVGIRQASQRLRDYPHQLSGGERQRVMIAMALLTRPELLIADEPTTALDVSVQAQILSLLRELQRELNMGLLFITHNLSIVKKLADSVAVMQHGKCVENQRADTLLSAPTHPYTQKLLNSEPTGDPVPLPAGQAPLLEVDKLRVAFPIRKGILKRVVDHNVVVNNISFTLHPGETLGLVGESGSGKSTTGLALLRLIRSEGRIVFDGQSLDTLNRRQLLPVRHRIQVVFQDPNSSLNPRLNVLQIIEEGLRVHQPTLSGAQREQQVKAVMMEVGLDPETRHRYPAEFSGGQRQRIAVARALILKPSLIILDEPTSSLDKTVQAQILALLKSLQQKHRLAYIFISHDLHVVRALCHQVIVLRQGEVVEQGQCERVFTAPQQAYTRQLLALS

SEQ ID NO: 13936 - protein, 586 aa, Salmonella typhi
  VARIANT (1)...(586): Xaa = Any Amino Acid
MVTHRQRYREKVSQMVSWGHWFALFNILLATLLGSRYLFVADWPTTLAGRIYSYLSIVGHFSFLVFATYLLILFPLTFIVMSQRLMRFLSAILATAGMTLLLIDSEVFTRFHLHLNPIVWELVINPDQNEMARDWQLMFISVPVILLIEMLFATWSWQKLRSLTRRRHFARPLAAFFFVSFIASHLIYIWADANFYRPITMQRANLPLSYPMTARRFLEKHGLLDAQEYQRRLVEQGNPEAVSVQYPLSNLHYRDMGTGQNVLLITVDGLNYSRFEKQMPELATFAEQNIDFTRHMSSGNTTDNXIFGLFYGISPGYMDGVLSTRTPAALITALNQQGYQLGLFSSDXFASPLYRQALLSDFSMPAAQTQSDAQTASQWIDWLGRYAQEDXRWFSWISFXGTNIDDSNQXNXVKRYASAASDVDAQINRVLNALREAGKFDNTVVIITAGRGIPLTPEENRFDWSQGHLQVPLVIHWPGTPAQRINVLTDHTDVMTTLMQRLLHVSTPANEYSQGQDIFTVPRRHNWVTAADGSTLAITTPQMTLVLNNNGHYQTYDLHGEKIKDQKPQLSLLLQVLTEEKRFIAN

SEQ ID NO: 13937 - protein, 293 aa, Salmonella typhi
MKQRIAVCSLCPSPTMGFFFYFKRPASPFIMARRKKTDRTRMKTVTVKNLIIGEGMPKIIVSLMGRDINSVKAEALAYREATFDILEWRVDHFMDIASTQSVLTAARVIRDAMPDIPLLFTFRSAKEGGEQTITTQHYLTLNRAAIDSGLVDMIDLELFTGDADVKATVDYAHAHNVYVVMSNHDFHQTPSAEEMVLRLRKMQALGADIPKIAVMPQSKHDVLTLLTATLEMQQHYADRPVITMSMAKEGVISRLAGEVFGSAATFGAVKQASAPGQIAVNDLRSVLMILHNA

SEQ ID NO: 13938 - protein, 642 aa, Salmonella typhi
  VARIANT (1)...(642): Xaa = Any Amino Acid
MPVITLPDGSQRHYDHPVSPMDVALDIGPGLAKATIAGRVNGELVDASDLIENDATLSIITAKDEEGLEIIRHSCAHLLGHAIKQLWPHTKMAIGPVVDNGFYYDVDLDRTLTQEDVEALEKRMHELAEKNYDVIKKKVSWHEARETFVKRGESYKVSILDENIAHDDKPGLYHHEEYVDMCRGPHVPNMRFCHHFKLMKTAGAYWRGDSNNKMLQRIYGTAWADKKALNAYLQRLEEAAKRDHRKIGKQLDLYHMQEEAPGMVXXHNDGWTIXRELEVFVRSXLKEYXYQEVKGPFMMDRVLWEKTGHWDNYKDAMFTTSSENREYCIKPMNCPGHVQIFNQGLKSYRDLPLRMAEFGSCHRNEPSGALHGLMRVRGFTQDDAHIFCTEEQIRDEVNACIRMVYDMYSTFGFEKIVVKLSTRPDKRIGSDEMWDRAEADLAVALEENNIPFEYQLGEGAFYGPKIEFTLYDCXDRAWQCGTVQLDFSLPSRLSASYVGEDNERKVPVMIHRAILGSMERFIGILTEEFAGFFPTWLAPVQVVVMNITDSQSEYVNELTQKLQNAGIRVKADLRNEKIGFKIREHTLRRVPYMLVCGDKEVEAGKVAVRTRRGKDLGSLDVNDVIEKLQQEIRSRSLQQLEE

SEQ ID NO: 13939 - protein, 248 aa, Salmonella typhi
MLSIKDLQVSVEEKAILRGLNLDIRPGEVHAIMGPNGSGKSTLSATLAGREDYEVTGGSVTFKGKDLLELSPEERAGEGIFMAFQYPVEIPGVSNQFFLQTALNAVRAYRGQASLDRFDFQDLMEEKIALLKMPEDLLTRSVNVGFSGGEKKRNDILQMAVLEPELCILDESDSGLDIDALKIVAEGVNALRDDKRAFIIVTHYQRILDYIKPDYVHVLYQGRIVRSGDFTLVKQLEEQGYGWLTEQQ

SEQ ID NO: 13940 - protein, 144 aa, Salmonella typhi
  VARIANT (1)...(144): Xaa = Any Amino Acid
MSLREALEKAEEAGVDLVEISPXAEPPVCRIMDYGKFXYEKSKSSKEQKXKXKVIQVKEIKFRPXTDEGDYQVKLRSLIRFLEEGDKAKITLRFRGREMAHQQIGMEVLNRVKNDLQELAVVESFPTKIEGRQMIMVLAPKKKQ

SEQ ID NO: 13941 - protein, 118 aa, Salmonella typhi [sequence omitted]

SEQ ID NO: 13942 - protein, 331 aa, Salmonella typhi
MRKTMSHLAELVANAAAAINQASDVAALDNVRVEYLGKKGHLTLQMTTLRDLPPEERPAAGAVINAAKEQVQQALNARKAELESAALNARLAAETIDISLPGRRIENGGLHPVTRTIDRIESFFGELGFTVATGPEIEDDYHNFDALNIPGHHPARADHDTFWFDATRLLRTQTSGVQIRTMKAQQPPIRIIAPGRVYRNDYDQTHTPMFHQMEGLIVDTNISFTNLKGTLHDFLRNFFEEDLQIRFRPSYFPFTEPSAEVDVMGKNGKWLEVLGCGMVHPNVLRNVGIDPEIYSGFAFGMGMERLTMLRYGVTDLRSFFENDLRFLKQFK

SEQ ID NO: 13943 - protein, 601 aa, Salmonella typhi
MKFSELWLREWVNPAIDSDALANQITMAGLEVDGVEPVAGSFNGVVVGEVVECAQHPNADKLRVTKVNVGGERLLDIVCGAPNCRQGLKVAVATIGAILPGDFKIKAAKLRGEPSEGMLCSFSELGISDDHSGIIELPADAPLGTDIREYLKLDDNTIEISVTPNRADCLGIIGVARDVAVLNKAPLQEPEMAPVTATISDTLLITVEAVDACPRYLGRVVKGINVNAPTPLWMKEKLRRCGIRSIDAVVDVTNYVLLELGQPMHAFDKDRIDGGIVVRMAKEGETVVLLDGSEATLNADTLVIADHHKALGIAGIFGGEHSGVNGETQNVLLECAYFNPLSITGRARRHGLHTDASHRYERGVDPALQYKTIERATRLLLDICGGDAGPIIDVSNEATLPKRATITLRRSKLDRLIGHHIADEQVSDILRRLGCEVTEGQDEWKAVAPTWRFDMEIEEDLVEEVARVYGYNNIPDEPIQAGLIMGTHREADLSLKRVKTMLNDKGYQEVITYSFVDPKVQQLIHPGAEALLLPNPISVEMSAMRLSLWSGLLATVVYNQNRQQNRVRIFETGLRFVPDTQANLGIRQDLMLAGVIMRSPL

SEQ ID NO: 13944 - protein, 329 aa, Salmonella typhi
MDNMLTFARQQQRRNVRWLLSLSLLVLLATLLSLCAGEQWIAPGDWLSARGELFVWQIRLPRTLAVLLVGAALALSGAVMQALFENPLAEPGLLGVSNGAGVGLIAAVLLGQGQLPGWALGLCAIAGALIITLILLRFARRHLSTSRLLLAGVALGIICSALMTWAIYFSTSFDLRQLMYWMMGGFGGVDWQQSWLMIALIPVLIWICCQSQPLNMLALGETSARQLGLPLWLWRNLLVIATGWMVGVSVAMAGAIGFIGLVIPHILRLCGLTDHRVLLPGCALAGAIALLLADVVARLALASAELPIGVVTATLGAPVFIWLLLKSAR

SEQ ID NO: 13945 - protein, 90 aa, Salmonella typhi
MNKCPLIEKIAAGADISKAAAGRALDAIIASVTESLKEGDDVALVGFGTFAVKERAARTGRNPQTGKEITIAAAKVPSFRAGKALKDAVN

SEQ ID NO: 13946 - protein, 655 aa, Salmonella typhi
MGIFSIANQHIRFAVKLACAIVLALFIGFHFQLETPRWAVLTAAIVAAGPAFAAGGEPYSGAIRYRGMLRIIGTFIGCIAALIIIISMIRAPLLMILVCCVWAGFCTWISSLVRIENSYAWGLSGYTALIIVITIQTEPLLTPQFALERCSEIVIGIGCAILADLLFSPRSIKQEVDRELDCLLVAQYQLMQLCIKHGDSEEVDNAWGDLVRRTAALEGMRSNLNMESSRWVRANRRLKALNTLSLTLITQSCETYLIQNTRPELITDTFRELFETPVETVQDVHRQLKRMRRVIVWTGERETPVTLYSWVGAATRYLLLKRGVISNTKISATEEEILQGEPVVKVESAERHHAMVNFWRTTLSCILGTLFWLWTGWTSGNGAMVMIAVVTSLAMRLPNPRMVCIDFIYGTLAALPLGLLYFLVIIPNTQQSMLLLCLSLAVLGFFIGIEVQKRRLGSMGALASTINIIVLDNPMTFHFIQFLDSALGQIVGCMLAFIVILLVRDKSKDRTGRVLLNQFVSAAVSAMTTNVVRRKENRLPALYQQLFLLMNKFPGDLPKFRLALTMIIAHQRLRDAPIPVNEDLSVFHRQLRRTADHVISAGSDDKRRRYFGQLLDELDIYQEKLRIWEAPPQVTEPVKRLTGMLHKYQNALTDS

SEQ ID NO: 13947 - protein, 816 aa, Salmonella typhi
  VARIANT (1)...(816): Xaa = Any Amino Acid
MPPLRLTASVKTSFVWACWATGRIRTXTMDFKTEANIIRALGRIIKNGHLHKGAKPVHWCVDCRSALAEAEVEYYDKTSPSIDVAFRAVDQDAVKAKFGLPGVSGPVSLVIWTTTPWTLPANRAISLAPDFDYALVQIDGQAVILAKDLVESVIQRIGAAEYTILGTVKGAELELLRFTHPFMGFDVPAILGDHVTLDAGTGAVHTAPGHGPDDYVIGQKYGLETANPVGPDGAYLPGTYPTLDGVNVFKANDIVIELLKEKGALLHVEKMQHSYPCCWRHKTPIIFRATPQWFVSMDKEGLRQQSLKEIKGVQWIPDWGQARIESMVANRPDWCISRQRTWGVPMSLFVHKETQELLPIERTLAAMEEVAKRVEVDGIQAWWDLDPKEIXGEDADQYEKVPDTLDVWFDSGSTSYSVVDARPEFAGHAADMYLEGSDQHRGWFMSSLMISVAMKGKAPYRQVLTHGFTVDGQGRKMSKSIGNTVSPQDVMNKLGADILRLWVASTDYTGEMAVSDEILKRAADSYRRIRNTARFLLANLNGFNPATDMVKPEEMVVLDRWAVGCAKTAQQEILKAYEAYDFHEVVQRLMRFCSVEMGSFYLDIIKDRQYTAKADSVARRSCQTALYHIAEALVRWMAPIMSFTADEIWGYLPGEREKYVFTGEWYDGLFGLEENEEFNDAFWDDVRYIKDQVNKELENQKANGIKSNLEAKVTLKYADDANGTIKKLKLLGEEVRFIFITSQFVISEQAGGIDDENIQYNAGNTTVQAVVTRAEGDKCPRCWHYTTDVGKVAEHADICGRCVSNIAGNGEQRKFA

SEQ ID NO: 13948 - protein, 241 aa, Salmonella typhi
MSSWVEVSLNTPAQLSLPLYLPDDETFASFWPGDNASLLAALQNVLRQEHSGYIYLWAREGAGRSHLLHAACAELSQRGDAVGYVPLDKRTWFVPEVLDGMEHLSLVCIDNIECVAGDELWEMAIFDLYNRILESGKTRLLITGDRPPRQLNLGLPDLASRLDWGQIYKLQPLSDEDKLQALQLRARLRGFELPEDVGRFLLKRLDREMRTLFMTLDQLDHASITAQRKLTIPFVKEILKL

SEQ ID NO: 13949 - protein, 208 aa, Salmonella typhi
MKIVEVKHPLVKHKLGLMRENDISTKRFRELASEVGSLLTYEATADLETEKVTIEGWNGPVEIDQIKGKKITVVPILRAGLGMMEGVLENVPSARISVVGMYRNEETLEPVPYFQKLVSNIDERMALIVDPMLATGGSVIATIDLLKKAGCSSIKVLVLVAAPEGIAALEKAHPDVELYTASIDQGLNEHGYIIPGLGDAGDKIFGTK

SEQ ID NO: 13950 - protein, 525 aa, Salmonella typhi
MTENIHKHRILILDFGSQYTQLVARRVRELGVYCELWAWDVTEAQIRDFNPSGIILSGGPESTTEENSPRAPQYVFEAGVPVFGVCYGMQTMAMQLGGHVEGSNEREFGYAQVEVLTDSALVRGIEDSLTADGKPLLDVWMSHGDKVTAIPSDFVTVASTESCPFAIMANEEKRFYGVQFHPEVTHTRQGMRMLERFVRDICQCEALWTPAKIIDDAVARIREQVGDDKVILGLSGGVDSSVTAMLLHRAIGKNLTCVFVDNGLLRLNEAEQVMDMFGDHFGLNIVHVPAEDRFLSALAGENDPEAKRKIIGRVFVEVFDEEALKLEDVKWLAQGTIYPDVIESAASATGKAHVIKSHHNVGGLPKEMKMGLVEPLKELFKDEVRKIGLELGLPYDMLYRHPFPGPGLGVRVLGEVKKEYCDLLRRADAIFIEELRKADLYDKVSQAFTVFLPVRSVGVMGDGRKYDWVVSLRAVETIDFMTAHWAHLPYDFLGRVSNRIINEVNGISRVVYDISGKPPATIEWE

SEQ ID NO: 13951 - protein, 453 aa, Salmonella typhi
MKLKTTLFGNVYQFKDVKEVLAKANELRSGDVLAGVAAASSQERVAAKQVLSEMTVADIRNNPVIAYEEDCVTRLIQDDVNETAYNRIKNWSISELREYVLSDETSVDDIAFTRKGLTSEVVAAVAKICSNADLIYGGKKMPVIKKANTTIGIPGTFSCRLQPNDTRDDVQSIAAQIYEGLSFGAGDAVIGVNPVTDDVENLTRVLDTVYGVIDKFNIPTQGCVLAHVTTQIEAIRRGAPGGLIFQSICGSEKGLKEFGVELAMLDEARAVGAEFNRIAGENCLYFETGQGSALSAGANFGADQVTMEARNYGLARYYDPFLVNTVVGFIGPEYLYNDRQIIRAGLEDHFMGKLSGISMGCDCCYTNHADADQNLNENLMILLATAGCNYIMGMPLGDDIMLNYQTTAFHDTATVRQLLNLRPSPEFERWLETMGIMANGRLTKRAGDPSLFF

SEQ ID NO: 13952 - protein, 330 aa, Salmonella typhi
MVCWGQKWHYAPLIIKLTKVQAERSPMSWIERIKSNITPTRKASIPEGVWTKCDSCGQVLYRAELERNLEVCPKCDHHMRMSARNRLHSLLDEGSLVELGSELEPKDVLKFRDSKKYKDRLASAQKETGEKDALVVMKGTLHGMPVVAAAFEFAFMGGSMGSVVGARFVRAVEQALEDNCPLVCFSASGGARMQEALMSLMQMAKTSAALAKMQERGLPYISVLTDPTMGGVSASFAMLGDLNIAEPKALIGFAGPRVIEQTVREKLPPGFQRSEFLIEKGAIDMIVRRPEMRLKLASILAKLMNLPAPNPDAPREGVVVPPAPDQESEA

SEQ ID NO: 13953 - protein, 337 aa, Salmonella typhi
MSEGWNIAILGATGAVGEALLETLAERQFPVGEIYALARHESAGEHLRFGGKSVIVQDAADFDWTQAQLAFFVAGAEASAAWIDDATNAGCLVIDSSGLFALEPDVPLVVPEVNPYVLADYRNRNVIAVADSLTSQLLAALKPLIDQGGLSRIAVTSMLSASAQGKKAVDALAGQSAKLLNGIPIDEDDFFGRQLAFNMLPLLPDREGSVRQERRIVDEVRKILQDDGVMISASVVQSPVFYGHAQMVSFEALRPLAAEEAREAFSRGEDIVLSEETDYPTQVGDASGNPQLSIGCVHNDYGMPEQIQFWSVADNVRFGGALMAVKIAEKLVQEYLY

SEQ ID NO: 13954 - protein, 362 aa, Salmonella typhi
MMAGNTIGQLFRVTTFGESHGLALGGIVDGVPPGIPLTEADLQHDLDRRRPGTSRYTTQRREPDQVKILSGVFDGVTTGTSIGLLIENTDQRSQDYSAIKDVFRPGHADYTYEQKYGLRDYRGGGRSSARETAMRVAAGAIAKKYLAEKFGIEIRGCLTQMGDIPLEIKDWRQVELNPFFCPDADKLDALDELMRALKKEGDSIGAKVTVMASGVPAGLGEPVFDRLDADIAHALMSINAVKGVEIGEGFNVVALRGSQNRDEITAQGFQSNHAGGILGGISSGQHIVAHMALKPTSSITVPGRTINRMGEEVEMITKGRHDPCVGIRAVPIAEAMLAIVLMDHLLRHRAQNADVKTEIPRW

SEQ ID NO: 13955 - protein, 419 aa, Salmonella typhi
  VARIANT (1)...(419): Xaa = Any Amino Acid
MXLRQKMTDXRVENSSGRAARKLRLALMGXAXIAAIGYIDPGNFATNIQAGASXGYQLLWVVVWANLMAMLIQILSAKLGIATGKNLAEQIRDHYPRPVVWFYXVQAEIIAMATDLAEXXSRAIGFKLIXGVSLQQGAVLPGIATFLILMLQRRGQKPLEKVIGGLLLFVAAAYIVELFFSQXXXXQLXKGMVXPALPNPEAVXLAAGVLGATIMPHVIYLHSSLTQHLHGGTRQQRYSATKWDVAIAMTIAGFVNLAMMATAAAAFHFSGHTGIADLDQAYLTLEPLLSHAAATVFGLSLVAAGLSSTVVGTLAGQVVMQGFVRFHIPLWVRRTITMLPSFIVILMGLDPTRILVMSQVLLSFGIALALVPLLIFTSNATLMGELVNTRRVKQIGWIIVVLVVALNIWLLVGTVMGLS

SEQ ID NO: 13956 - protein, 471 aa, Salmonella typhi
  VARIANT (1)...(471): Xaa = Any Amino Acid
MKIKTRFAPSPTGYLHVGGARTALYSWLFARHHGGEFVLRIEDTDLERSTPEAIEAIMDGMNWLNLEWDEGPYFQTKRFDRYNAVIDEMLEAGTAYKCYCSKERLEQLREDQMAKGEKPRYDGRCRHSHEHHADDEPCVVRFANPXXXSXIXDDQIRGPIEFSXXELDDLIIRRTDGSPTYNFCVVVDDWDMXITHVIRGEDHINNTPRQINILKALNAPVPMYAHVSMINGDDGKKLSKRHGAVSVMQYRDDGYLPEALLNYLVRLGWSSGDQEIFTREEMIKLFSLGAVSKSASAFNTDKLLWLNHHYINTLAPEYVATHLQWHIEQENIDTRNGPQLAELVKLLGERCKTLKEMAQSCRYFYEDFSEFDADAAKKHLRPVARQPLEVVRDKLSAITDWSAENVHHAIQATADELEVGMGKVGMPLRVAVTGAGXSPALDVTVHAIGKTRSIERINKALGFIAERESQQ

SEQ ID NO: 13957 - protein, 878 aa, Salmonella typhi
MSDLAREITPVNIEEELKSSYLDYAMSVIVGRALPDVRDGLKPVHRRVLYAMNVLGNDWNKAYKKSARVVGDVIGKYHPHGDSAVYDTIVRMAQPFSLRYMLVDGQGNFGSIDGDSAAAMRYTEIRLAKIAHGLMADLEKETVDFVDNYDGTEKIPDVMPTKIPNLLVNGSSGIAVGMATNIPPHNLTEVINGCLAYIDNEDISIEGLMEHIPGPDFPTAAIINGRRGIEEAYRTGRGKVYIRARAEVEADAKTGRETIIVHEIPYQVNKARLIEKIAELVKDKRVEGISALRDESDKDGMRIVIEVKRDAVGEVVLNNLYSQTQLQVSFGINMVALHHGQPKIMNLKDIISAFVRHRREVVTRRTIFELRKARDRAHILEALAIALANIDPIIELIRRAPTPAEAKAALISRPWDLGNVAAMLERAGDDAARPEWLEPEFGVRDGQYYLTEQQAQAILDLRLQKLTGLEHEKLLDEYKELLEQIAELLHILGSADRLMEVIREEMELIRDQFGDERRTEITANSADINIEDLISQEDVVVTLSHQGYVKYQPLTDYEAQRRGGKGKSAARIKEEDFIDRLLVANTHDTILCFSSRGRLYWMKVYQLPEASRGARGRPIVNLLPLEANERITAILPVREYEEGVNVFMATASGTVKKTALTEFSRPRSAGIIAVNLNDGDELIGVDLTSGSDEVMLFSAAGKVVRFKEDAVRAMGRTATGVRGIKLAGDDKVVSLIIPRGEGAILTVTQNGYGKRTAADEYPTKSRATQGVISIKVTERNGSVVGAVQVDDCDQIMMITDAGTLVRTRVSEISVVGRNTQGVILIRTAEDENVVGLQRVAEPVDDEELDAIDGSVTEGDEDIAPEAESDDDVADDADE

SEQ ID NO: 13958 - protein, 613 aa, Salmonella typhi
  VARIANT (1)...(613): Xaa = Any Amino Acid
MNMLXLTIILPLIGFVLLAFSRGRWSENLSATIGVGSVGLAALVTAFVGMDFFANGKQAFSQPLWTWMSVGNFNIGFNLVLDGLSLTMLSVVTGVGFLIHMFASWYMRGEEGYSRFFAYTNLFIASMVVLVLSDNLLLMYLGWEGVGLCSYLLIGFYYSDPKNGAAAMKAFVVTRVGDVFLAFALFILYNELGTLNFREMVELAPAHFADGNNMLMWATLMLLGGAVGKSAQLPLQTWLADAMAGPTPVSALIHAATMVTAGVYLIARTHGLFLMTPEILHLVGIIGAITLVMAGFAALVQTDIKRVLAYSTMSQIGYMFLALGVQAWDAAIFHLMTHAFFKALLFLASGSVILACHHEQNIFKMGGLRKSIPLVYACFLVGGAALSALPLVTAGFFSKDEILAGAMANGHINLMVAGLVGAFMTSLYTFRMIFIVFHGKEXIHAHAGKXITHHLPLIVLMILSTFVGALIVPPLQGVLPQTTELAHGRVLTLEITSGVVAIAGIXIAAWLWLGXRTLVTSIAXSAPGHLLGTWWYNAWGFDWLYDKVFVKPFLGIAWLLKRDPLNALMNIPAILSRFAGKGLVLSENGYLRWYVASMSIGAVVVLALLMVLR

SEQ ID NO: 13959 - protein, 445 aa, Salmonella typhi
MKNVIRTPETHPLTWRLRDDKQPVWLDEYRSKNGYEGARKALTGLSPDEIVSQVKDAGLKGRGGAGFSTGLKWSLMPKDESMNIRYLLCNADEMEPGTYKDRLLMEQLPHLLVEGMLISAFALKAYRGYIFLRGEYIEAAVHLRRAIAEATEAGLLGKNIMGTGFDFELFVHTGAGRYICGEETALINSLEGRRANPRSKPPFPATSGVWGKPTCVNNVETLCNVPAILANGVEWYQNISKSKDAGTKLMGFSGRVKNPGLWELPFGTIAREILEDYAGGMRDGLKFKAWQPGGAGTDFLTEAHLDLPMEFESIGKAGSRLGTALAMAVDHEIGMVSLVRNLEEFFARESCGWCTPCRDGLPWSVKILRALERGEGQPGDIETLEQLCRFLGPGKTFCAHAPGAVEPLQSAIKYFREEFEAGIKQPFSNTHLINGIQPNLLKERW

SEQ ID NO: 13960 - protein, 714 aa, Salmonella typhi
MSRIIMLIPTGTSVGLTSVSLGVIRAMERKGVRLSVFKPIAQPRAGGDAPDQTTTIVRANSTLPAAEPLKMSHVESLLSSNQKDVLMEEIIANYHANTKDAEVVLVEGLVPTRKHQFAQSLNYEIAKTLNAEIVFVMSQGTDTPEQLNERIELTRSSFGGAKNTNITGVIINKLNAPVDEQGRTRPDLSEIFDDSSKAQVIKIDPAKLQESSPLPVLGAVPWSFDLIATRAIDMARHLNATIINEGDIKTRRVKSVTFCARSIPHMLEHFRAGSLLVTSADRPDVLVAACLAAMNGVEIGALLLTGGYEMDARISKLCERAFATGLPVFMVNTNTWQTSLSLQSFNLEVPVDDHERIEKVQEYVANYVNADWIESLTATSERSRRLSPPAFRYQLTELARKAGKRVVLPEGDEPRTVKAAAICAERGIATCVLLGNPDEINRVAASQGVELGAGIEIVDPEVVRESYVARLVELRKSKGMTEPVAREQLEDNVVLGTLMLEQDEVDGLVSGAVHTTANTIRPPLQLIKTAPGSSLVSSVFFMLLPEQVYVYGDCAINPDPTAEQLAEIAIQSADSAIAFGIEPRVAMLSYSTGTSGAGSDVEKVREATRLAQEKRPDLMIDGPLQYDAAVMADVAKSKAPNSPVAGRATVFIFPDLNTGNTTYKAVQRSADLISIGPMLQGMRKPVNDLSRGALVDDIVYTIALTAIQASQQQQ

SEQ ID NO: 13961 - protein, 465 aa, Salmonella typhi
  VARIANT (1)...(465): Xaa = Any Amino Acid
MDMXILXTLNXVVDILKVPSVLVGLIALIGLVAQKKAFSDVVKGTIKTILGFIVLGGGATVLVGSLNPLGGMFEHAFNIQGIIPNNEAIVSIALEKYGASTALIMAFGMVANIVVARFTRLKYIFLTGHHTFYMACMIGVILTVAGFEGVGLVFTGSLILGLVMAFFPALAQRYMRRITGTDDIAFGHFGTLGYVLSGWIGSLCGKGSRSTEEMNLPKNLSFLRDSSISISLTMMIIYLIMAVSAGREYVEATFSGGQNYLVYAIIMAITFAAGVFIILQGVRLILAEIVPAFTGFSEKLVPNARPALDCPVVYPYAPNAVLIGFLFSFLGGLVGLFLLGQMKLVLILPGVVPHFFTGATAGVFGNATGGRRGAMIGAFANGLLITFLPVLLLPVLGAIGFANTTFSDADFGVIGILLGNLARYLSPMAITGLVVALFALLVAYNVLAKSKKATAEVQENSGAKE

SEQ ID NO: 13962 - protein, 152 aa, Salmonella typhi
MGANNMLGTWLSDATITLRESVETWPQALEICGKPLLDAGVIAPEYITAIVQQHQKLGPYYVLAPGLAMPHARPEEGAKGLGLSLLKLQRGVSFGADEFDPVDIIIMLAAPDKHSHIEMISALAELFSSDVDMEKLHQAKNLEDIKTIIDRF

SEQ ID NO: 13963 - protein, 297 aa, Salmonella typhi
MQILITGGTGLIGRHLIPRLLILGHQVTVVTRNPDNARQILDSRVTLWKGLAEREHLNEIDAIINLAGEPIADKRWTSQQKERLCQSRWAITQKLVDLIHASATPPSVLISGSATGYYGDLGDVVVTEDEPPHNEFTHKLCARWEQIACRAQSDQTRVCLLRTGVVLAPQGGILGKMVPPFRLGLGGPVGNGRQYLAWIHIDDMVNGILWLLDNDLRGPFNMVSPYPVHNEQFAHALGRALRRPAIIRIPATAIRLLMGESSVLVLGGQRALPKRLEAAGFAFRWYDLEEALADVIR

SEQ ID NO: 13964 - protein, 409 aa, Salmonella typhi
  VARIANT (1)...(409): Xaa = Any Amino Acid
MRSPEGESAIVRNIAVSKEKFERTKPHVNVGTIGHVDHGKTTLTAAITTVLAKTYGGAARAFDQIDNAPEEKARGITINTSHVEYDTPTRHYAHVDCPGHADYVKNMITGAAQMDGAILVVAATDGPMPQTREHILLGRQVGVPYIIVFLNKCDMVDDEELLELVEMEVRELLSQYDFPGDDTPIVRGSALKALEGDAEWEAKIIELAGFLDSYIPEPERAIDKPFLLPIEDVFSISGRGTVVTGRVERGIIKVGEEVEIVGIKETQKSTCTGVEMFRKLLDEGRAGENVGVLLRGIKREEIERGQVLAKPGTIKPHTKFESEVYILSKDEXGRHTPFFKGYRPQFYFRTTDVTGTIELPEGVEMVMPGDNIKMVVTLIHPIAMDDGLRFAIREGGRTVGAGVVAKVLG

SEQ ID NO: 13965 - protein, 704 aa, Salmonella typhi
  VARIANT (1)...(704): Xaa = Any Amino Acid
MARTTPIARYRNIGISAHIDAGKTTTTERILFYTGVNHKIGEXHDGAATMDWMEQEQERGITXTSAATTAFWSGMAKQYEPHRINIIDTPGHVDFTIEVERSMRVLDGAVMVYCAVGGVQPQSETVWRQANKYKVPRIAFVNKMDRMGANFLKVVGQIKTRLGANPVPLQLAIGAEEGFTGVVDLVKMKAINWNDADQGVTFEYEDIPADMQDLANEWHQNLIESAAEASEELMEKYLGGEELTEEEIKQALRQRVLNNEIILVTCGSAFKNKGVQAMLDAVIDYLPSPVDVPAINGILDDGKDTPAERHASDDEPFSALAFKIATDPFVGNLTFFRVYSGVVNSGDTVLNSVKTARERFGRIVQMHANKREEIKEVRAGDIAAAIGLKDVTTGDTLCDPEXPIILERMELPEPVISXAVEPKTKADXXKMGLALGRLAKEDPSFRVWTDEESNQTIIAGMGELHLDIIVDRMKREFNVEANVGKPQVAYREAIRAKVTDIEGKHAKQSGGRGQYGHVVIDMYPLEPGSNPKGYEFINDIKGGVIPGEYIPAVDKGIQEQLKSGPLAGYPVVDLGVRLHFGSYHDVDSSELAFKLAASIAFKEGFKKAKPVLLEPIMKVEVETPEENTGDVIGDLSRRRXMLKGQESEVTGVKIHAEVXLXEMFGYAXQXRSXTXGRASYTMKFLKYDXAPXXVAQAVIEARGK

SEQ ID NO: 13966 - protein, 156 aa, Salmonella typhi
MPRRRVIGQRKILPDPKFGSELLAKFVNILMVDGKKSTAESIVYSALETLAQRSGKSELEAFEVALENVRPTVEVKSRRVGGSTYQVPVEVRPVRRNALAMRWIVEAARKRGDKSMALRLANELSDAADNKGTAVKKREDVHRMAEANKAFAHYRW

SEQ ID NO: 13967 - protein, 124 aa, Salmonella typhi; identical to SEQ ID NO: 10365

SEQ ID NO: 13968 - protein, 136 aa, Salmonella typhi
MLQPKRTKFRKMHKGRNRGLAAGADVSFGSFGLKAVGRGRLTARQIEAARRAMTRAVKRQGKIWIRVFPDKPITEKPLAVRMGKGKGNVEYWVALIQPGKVLYEMDGVPEELAREAFKLAAAKLPIKTTFVTKTVM

SEQ ID NO: 13969 - protein, 233 aa, Salmonella typhi; identical to SEQ ID NO: 10353

SEQ ID NO: 13970 - protein, 110 aa, Salmonella typhi [sequence omitted]

SEQ ID NO: 13971 - protein, 273 aa, Salmonella typhi
  VARIANT (1)...(273): Xaa = Any Amino Acid
MAVVKCKPTSPGRRHVVKVVNPELHKGKPFAPLVEKNSKSGGRNNNGRITTRHIGGGHKQAYRIVDFKRNKDGIPAVVERLEYDPNRSANIALVLYKDGERRYILAPKGLKAGDQIQSGVDAAIKAGNTLPMRNIPVGSTVHNVEMKPGKGGQLARSAGTYVQIVARDGAYVTLRLRSGEMRKVEADCRATLGEVGNAEHMLRVLGKAGAARWRGVRPTVRGTAMNPVDHPHGGGEGRNFGKHPVTPWGVQTKGKKTRSNKRTDKFIVRRRSX

SEQ ID NO: 13972 - protein, 100 aa, Salmonella typhi
MIREERLLKVLRAPHVSEKASTAMEKTNTIVLKVAKDATKAEIKAAVQKLFEVEVEVVNTLVVKGKVKRHGQRIGRRSDWKKAYVTLKEGQNLDFVGGAE

SEQ ID NO: 13973 - protein, 201 aa, Salmonella typhi [sequence omitted]

SEQ ID NO: 13974 - protein, 209 aa, Salmonella typhi
MIGLVGKKVGMTRIFTEDGVSIPVTVIEVEANRVTQVKDLANDGYRAVQVTTGAKKANRVTKPEAGHFAKAGVEAGRGLWEFRLAEGEEYTVGQSISVELFADVKKVDVTGTSKGKGFAGTVKRWNFRTQDATHGNSLSHRVPGSIGQNQTPGKVFKGKKMAGQMGNERVTVQSLDVVRVDAERNLLLVKGGVPGATGCDLIVKPAVKA

SEQ ID NO: 13975 - protein, 103 aa, Salmonella typhi
  VARIANT (1)...(103): Xaa = Any Amino Acid
MQNQRIRIRLKAFDHRLIDQSTAEXVETAKRTGAQVRGPIPLPTRKERFTVLISPHVNKDARDQYEIRTHKRLVDIVEPTEKTVDALMRLDLAAGVDVQISLG

SEQ ID NO: 13976 - protein, 310 aa, Salmonella typhi
MVRIYTLTLAPSLDSATITPQIYPEGKLRCSAPVFEPGGGGINVARAIAHLGGTATAIFPAGGATGEHLVALLADENVPVSTVDAKDWTRQNLHVHVESSGEQYRFVMPGATLDDDEFRQLEEQVLEIESGAILVISGSLPPGVKVEKLTQLISAAQKQGIRCIIDSSGDALTAALALGDIELVKPNLKELSALVNRDLTQPDDVRKAAQELVQSGKARRVVVSLGPQGALGIDSENCIQVVPPPVKSQSTVGAGDSMVGAMTLKLAQDASLEEMVRFGVAAGSAATLNQGTRLCSHDDTQKIYAYLSAQ

SEQ ID NO: 13977 - protein, 363 aa, Salmonella typhi
MGFKCGIVGLPNVGKSTLFNALTKAGIEAANFPFCTIEPNTGVVPMPDPRLDQLAEIVKPQRILPTTMEFVDIAGLVKGASKGEGLGNQFLTNIRETEAIGHVVRCFENDNIIHVAGKVNPAEDIDVINTELALADLDTCERAIHRVQKKAKGGDKDAKAELAALEKCLPHLAEAGMLRSLDLTDEDKAAIRYLSFLTLKPTMYIANVNEDGFENNPYLDQVREIAAKEGSVVVPVCAAVEADIAELDDDERDEFMAELGLEEPGLNRVIRAGYRLLNLQTYFTAGVKEVRAWTIPVGATAPQAAGKIHTDFEKGFIRAQTIAFDDFITYKGEQGAKEAGKMRAEGKDYIVKDGDIMNFLFNV

SEQ ID NO: 13978 - protein, 321 aa, Salmonella typhi
MPEVLLVPDMKLFAGNATPELAQRIANRLYTSLGDAAVGRFSDGEVSVQINENVRGGDIFIIQSTCAPTNDNLMELVVMVDALRRASAGRITAVIPYFGYARQDRRVRSARVPITAKVVADFLSSVGVDRVLTVDLHAEQIQGFFDVPVDNVFGSPILLEDMLQLNLDNPIVVSPDIGGVVRARAIAKLLNDTDMAIIDKRRPRANVSQVMHIIGDVAGRDCVLVDDMIDTGGTLCKAAEALKERGAKRVFAYATHPIFSGNAANNLRNSVIDEVVVCDTIPLTDEIKALPNVRTLTLSGMLAEAIRRISNEESISAMFEH

SEQ ID NO: 13979 - protein, 360 aa, Salmonella typhi
MKPSIVAKLEALHERHEEVQALLGDAGIIADQDRFRALSREYAQLSDVSRCFTDWQQVQDDIETAQMMLDDPEMREMAQEELREAKEKSEQLEQQLQVLLLPKDPDDERNAFLEVRAGTGGDEAALFAGDLFRMYSRYAEARRWRVEIMSMSEGEHGGYKEIIAKISGDGVYGRLKFESGGHRVQRVPATESQGRIHTSACTVAVMPELPEAELPDINPADLRIDTFRSSGAGGQHVNTTDSAIRITHLPTGIVVECQDERSQHKNKAKALSVLGARIHAAETAKRQQAEASTRRNLLGSGDRSDRNRTYNFPQGRVTDHRINLTLYRLDETMEGKLDMLIEPIVQEHQADLLAALSEQE

SEQ ID NO: 13980 - protein, 264 aa, Salmonella typhi
  VARIANT (1)...(264): Xaa = Any Amino Acid
MIGLRLDGYDPDLHHDAAVAFCIRARDDELFSPRHQHRKGQLILALHGAITCEVENAMWMVPPQYAVWLPGSLPHSNHVTAGAELCFLFIEPAAVVMPERCCTLKISPLCRELILSLARRTDSERAQMPTQRLIQVLFDELPQQPQEQLQLPVSGHPXIRXMVETMAXEHARWNTLXQWASVFAMSERNLARLVVKETGLSFRRWRHQLQLILALQALIAGRNVQQTAQMLGYDSTTAFITMFKKGLGQTPGQYLTGELLLSHN

SEQ ID NO: 13981 - protein, 334 aa, Salmonella typhi
MEYMTIKVGINGFGRIGRIVFRAAQKRSDIEIVAINDLLDAEYMAYMLKYDSTHGRFDGTVEVKDGHLIVNGKKIRVTAERDPANLKWDEVGVDVVAEATGIFLTDETARKHITAGAKKVVLTGPSKDNTPMFVKGANFDKYEGQDIVSNASCTTNCLAPLAKVINDNFGIIEGLMTTVHATTATQKTVDGPSHKDWRGGRGASQNIIPSSTGAAKAVGKVLPELNGKLTGMAFRVPTPNVSVVDLTVRLEKAATYEQIKAAVKAAAEGEMKGVLGYTEDDVVSTDFNGEVCTSVFDAKAGIALNDNFVKLVSWYDNETGYSNKVLDLIAHISK

SEQ ID NO: 13982 - protein, 275 aa, Salmonella typhi
MTLQQEIIQALGAKPHINPEEEIRRSVDFLKAYLKTYPFLKSLVLGISGGQDSTLAGKLSQMAITELREETGDNALQFIAVRLPYGVQADEQDCQDAIAFIQPDRVLTVNIKGAVLASEQALREAGIELSDFVRGNEKARERMKAQYSIAGMTHGVVVGTDHAAEAITGFFTKYGDGGTDINPLHRLNKRQGKQLLAALGCPEHLYKKVPTADLEDDRPSLPDEAALGVTYDNIDDYLEGKTLDSAIAKTIEGWYVKTEHKRRLPITVFDDFWKK

SEQ ID NO: 13983 - protein, 452 aa, Salmonella typhi
MSNVIASLEKVLLPFAVKIGKQPHVNAIKNGFIRLMPLTLAGAMFVLINNVFLSFGEGAFFYSMGIRLDASTIETLNGLKGIGGNVYNGTLGIMSLMAPFFIGMALAEERKVDALAAGLLSVAAFMTVTPYSVGEAYAVGANWLGGANIISGIIIGLVVAEMFTFIVRRNWVIKLPDSVPASVSRSFSALIPGFIILSIMGIIAWALSNYGSNFHQIIMDTISTPLASLGSVVGWAYVIFVPLLWFFGIHGSLALTALDSGIMTPWALENISIYQQYGSVDAALEAGKTFHIWAKPMLDSYIFLGGSGATLGLIIAIFLASRRADYRQVAKLALPSGIFQINEPILFGLPIIMNPVMFIPFILVQPILAAITLVAYYLGIIPPITNIAPWTMPTGLGAFFNTNGSVAALLVALFNLAVATLIYLPFVVVANKAQNAIEQEESEEDIANALKF

SEQ ID NO: 13984 - protein, 115 aa, Salmonella typhi
  VARIANT (1)...(115): Xaa = Any Amino Acid
MFDLEXVVDNQTAAEXLEEVVMGLIINSGQARSLAYGALRKAKEGDFEAAKAMMDQSRIALNEAHLVQTKLIEGDQGEGKMKVSLVLVHAQDHLMASMLARELIAELIELHEKLK

SEQ ID NO: 13985 - protein, 750 aa, Salmonella typhi
MSHNEKSPHQSPVHDTRESQPGLDSLAPSDGSHRPTPEPTPPGAQPTAPGSLKAPETANDKLTALDAFRKGSENYALTTNQGVRIADDQNSLRAGSRGPTLLEDFILREKITHFDHERIPERIVHARGSAAHGYFQPYKDLSDITKAAFLCDPQKITPVFVRFSTVQGGAGSADTVRDIRGFATKFYTEEGIFDLVGNNTPIFFIQDAHKFPDFVHAVKPEPHWAIPQGQSAHDTFWDYVSLQPETLHNVMWAISDRGIPRSYRTMEGFGIHTFRLINAQGKATFVRFHWKPLAGKASLVWDESQKLTGRDPDFHRRDLWEAIEAGDFPEYELGLQLIAEEDEFKFDFDLLDPTKLIPEELVPVQRVGKMVLNRNPDNFFAENEQAAFHPGHIVPGIDFTNDPLLQGRLFSYTDTQISRLGGPNFHEIPINRPTCPYHNFQRDGMHRMDIDTNPANYEPNSINDNWPRETPPAPKRGGFESYQERVDGNEIRERSPSFGEYYSHPRLFWLSQTPIEQQHIIDAFSFELGKVARAYIRERVVDQLAHIDVTLAQGVAHNLGFALTHEQTQIAPPPDVNGLKKDPALSLYAVPDGDVKGRVVAILLNDKVNAAELLTIFQALKAKGVHVKLLYSRMGEVTADDGSTLTIAATFAGAPSLTVDAVIVPCGNIADIESCGDARYYLLEAYKHLKPIALAGDARRFKALLNIDSQGEEGLVEADNVDHHFMDTLLTLMAAHRVWSRAGKINAIPA

SEQ ID NO: 13986 - protein, 183 aa, Salmonella typhi
MTKQPEDWLDDVPGDDIEDEDDEIIWVSKSEIKRDAEELKRLGAELVDLGKNALDKIPLDADLRDAIELAQRIKMEGRRRQLQLIGKMLRQRDVEPIRQALDKLKNRHNQQVVLFHKLEHLRDRLIVEGDDAVAEVLTLWPHADRQQLRSLIRNAKKEKEGNKPPKSARQIFQYLRELAENEG

SEQ ID NO: 13987 - protein, 550 aa, Salmonella typhi
  VARIANT (1)...(550): Xaa = Any Amino Acid
MTIPLWWQNGVIYQIYPKSFQDTTGSGTGDLRGVTQRLDYLQRLGVDAIWLTPFYISPQVDNGYDVANYTAIDPTYGTLDDFDELVAXAXARGIRIILDMVFNHTSTQHAWFREALNKESPYRQFYIWRDGTPDVCPNNWQSKFGGSAWRWHSQSEQYYLHLFAPEQADLNWDNPAVRAELRNVCEFWADRGVDGXRLDVXXXIAIDQDXPDDPXXDGRRXXTDXPRTHTFVREMNRDVFTPRNLMTVGEMSSTTLENCQQYAALSGDELSMTFNFHHLKVDYPNGEKWTLAKPDYVALKALFRQWQQGMHNVAWNALFWCNHDQPRIVSRFGDEGEYRVPAAKMLAMALHGMQGTPYIYQGEEIGMTNPHFTRITDYRDVESHNMFAALRAAGRDPDELLAILASKSRDNSRTPMQWDNGKNAGFTQGEPWISLCDNYTEVNVAAALRDEXSVFYTYQKLIALRKTQPVMIWGDYQDLLPGSPSVWCYRRQWQGQTLLVVANLSDQCQEWHPPHITGXWXALLXNYGXVXSQPAXMXLRPFXXIWWXQR

SEQ ID NO: 13988 - protein, 220 aa, Salmonella typhi
MAYRDQPLGELALSIPRASALFRQYDMDYCCGGKQTLARAAARHDVDIDIIEAQLAQLAEQPIEKDWRAVPLADIIDHIVVRYHDRHREQLPELILQATKVERVHADKPNVPRGLTKYLTALHEELSSHMMKEEQILFPMIKQGMGRQATGPISVMESEHDEAGELVDVIKHVTQNVTPPPEACTTWKAMYNGINEMIDALMEHISLENNVLFPRALAGE

SEQ ID NO: 13989 - protein, 452 aa, Salmonella typhi
  VARIANT (1)...(452): Xaa = Any Amino Acid
MPESKYRQQTIRAPRGTVLTAKSWLTEAPLRMLMNNLDPDVAENPHELVVYGGIGRAARNWECYDAIVDALTRLEADETLLIQSGKPVGVFKTHDNAPRVLIANSNLVPHWATWEHFNELDAKGLAMYGQMTAGSWIYIGSQGIVQGTYETFVEAGRQHYNGTLAGRWALTAGLGGMGGAQPLAATLAGACSLTIECQQSRIDFRLRTRYVDEQAATLDDALARITRYTREGKAVSVALCANAADILPELVNRGVRPDLVTDQTSAHDPLHGYLPSGWCWEEYQKNAQSDPRGTMQAAKRSMAAHVRAMLAFSKMGVPTFDYGNNIRQMAKEMGVENAFDFPGFVPAYIRPLFCRGIGPFRWVALSGDPQDIYKTDAKVKEIVAEDXHLHHWLDMARERIHFQGLPARICWVGLEWRQKLGLAFXRNGALRRGIRAHCDWPRSPGFRFCRQP

SEQ ID NO: 13990 - protein, 506 aa, Salmonella typhi
MNTMTLTPGQLSLSQLYDVWRHPVQLRLDASAIDGINASVACVNDIVAEGRTAYGINTGFGLLAQTRIADEDLQNLQRSLVLSHAAGVGDPLDDAMVRLIMVLKINSLARGFSGIRLSVIEALIALVNAGVYPLIPAKGSVGASGDLAPLAHLSLTLLGEGKARWQGEWLPAQAALKKAGLEPVALAAKEGLALLNGTQASTAFALRGLFEAQELFASAVVCGALTTEAVLGSCRPFDARIHAARGQQGQIDVARLFRHLLTDTSAIAESHHHCHKVQDPYSLRCQPQVMGACLTQLRQTKEVLLAEANAVSDNPLVFAEAGEVISGGNFHAEPVAMAADNLALAIAEIGALSERRITLMMDKHMSQLPPFLVKNGGVNSGFMIAQVTAAALASENKALAHPHSVDSLPTSANQEDHVSMAPAAGRRLWEMAANTRGVIAVEWLAACQGIDLREGLTSSPLLEQARQTLRERVAHYTQDRFFAPDIECATTLLAQGALQRLVPDFM

SEQ ID NO: 13991 - protein, 477 aa, Salmonella typhi
MVFQIIRLLATVSSVGGEPSGLSKICCLFLIWCRLVNLNLFNLVYKSIMTTDDLAFDKRHIWHPYTSMTSPLPVYPVERAEGCELVLASGERLIEGMSSWWAAIHGYNHPQLNAAMKAQIDAMSHVMFGGITHQPAVNLCRKLVAITPEPLECVFLADSGSVSVEVAMKMALQYWQARGESRQRFLTFRHGYHGDTFGAMSVCDPDNSMHSLWKGYLPENLFAPAPQSRMDGEWDESDIAPFARLMAAHRHEIAAVILEPIVQGAGGMRIYHPQWLRRIRNMCDREGILLIADEIATGFGRTGKLFACEHAGIAPDILCLGKALTGGTMTLSATLTTRQVAETISNGEAGCFMHGPTFMGNPLACAVACASLTLLESGEWRQQVASIESQLRAELAPAQSSPWVADVRVLGAIGVVETTHPVNMAALQRFFVGQGVWIRPFGKLIYLMPPYIIRPDQLRRLTQAVNDAVHNETFFSH

SEQ ID NO: 13992 - protein, 346 aa, Salmonella typhi
MARHPRWTLSQVTELFEKPLLELLFEAQQIHRQHFDPQQVQVSTLLSIKTGACPEDCKYCPQSSRYKTGLEAERLMEVEQVLDSARKAKNAGSTRFCMGAAWKNPHERDMPYLEKIVQGVKAMGLETCMTLGMLNESQAQRLANAGLDYYNHNLDTSPEFYGNIITTRTYQERLDTLEKVREAGIKVCSGGIVGLGETVTDRAGLLLQLANLPTPPESVPINMLVKVKGTPLADNDDVDAFDFIRTIAVARIMMPTSYVRLSAGREQMNEQTQAMCFMAGANSIFYGCKLLTTPNPAEDKDLQLFRKLGLNPQQTRVLAGDNEQQQRLEQTLMTPDTDDYYNAAAL

SEQ ID NO: 13993 - protein, 213 aa, Salmonella typhi
  VARIANT (1)...(213): Xaa = Any Amino Acid
MFTGIVQGTAKLVSIDEKPNFRTHVVTLPDYMLEGLETGASVAHNGCCLTVTEINGNQISFDLMKETLRITNLGALRVGDEVNVERAAKFSDEIGGHLMSGHIITTAEIAKILTSENNHQVWFKVQDASLMKYILYKGFIGVDGISLTVGEVTPTRFCVHLIPETLERTTLGRKKLGERVNIEIDPXTQAVVDTVERVLATRENVVRNQADIG

SEQ ID NO: 13994 - protein, 760 aa, Salmonella typhi
  VARIANT (1)...(760): Xaa = Any Amino Acid
MPMLNQELELSLNMAFARAREHRHEFMTVEHLLLALLSNPSAREALEACSVDLVALRQELEAFIEQTTPVLPASEEERDTQPTLSFQRVLQRAVFHVQSSGRSEVTGANVLVAIFSEQESQAAYLLRKHEVSRLDIVNFISHGTRKDEPSQSSDLGNQPAGDEQAGGEERMENFTTNLNQLARVGGIDPLIGREKXLERXIQVLCRRRKNNPLLAGESGVVKTAIAEGLAWRIVQGDVPEVMADCTIYSLDIGSLLAGTKYRGDFEKRFKALLKQLEQDTNSILFIDEIHTIIGAGAASGGQVDAANLIKPLLSSGKIRVIGSTTYQEFSNIFEKDRALARRFQKIDITEPSVEETVQIINGLKPKYEAHHDVRYTAKAVRAAVELAVKYINDRHLPDKAIDVIDEVGARARLMPVSKRKKTVNVADIESVVARIARIPEKSVSQSDRDTLKNLGDRLKMLVFGQDNAIEALTEAIKMSRAGLGHEHKPVGSFLFAGPTGVGKTEVTVQLSKALGIELLRFDMSEYMERHTVSRLIGAPPGYVGFDQGGLLTDAVIKHPHAVLLLDEIEKAHPDVFNLLLQVMDNGTLTDNNGRKADFRNVVLVMTTNAGVRETERKSIGLIHQDNSTDAMGEIKKVFTPEFRNRLDNIIWFDHLSGEVIHQVVDKFIVELQAQLDQKGVSLEVSQEARDWLAEKGYDRAMGARPMARVIQDNLKKPLANELLFGSLVDGGQVTVALDKEKNALTYDFQSAQKHKPEAAH

SEQ ID NO: 13995 - protein, 648 aa, Salmonella typhi
MTALLELCNVSRSYPSGEEQVAVLKDISLQIHAGEMVAIVGVSGSGKSTLMNILGCLDKPTSGTYRVAGRDVSTLDPDALAQLRREHFGFIFQRYHLLSHLTAAQNVEIPAVYAGIERKKRQARARELLLRLGLSDRVDYPPSQLSGGQQQRVSIARALMNGGQVILADEPTGALDSHSGEEVMAILRQLRDRGHTVIIVTHDPLIAAQAERIIEIHDGKIVHNPPAQEKKREQGVDAAVVNTAPGWRQFASSFREALSMAWLAMAANKMRTLLTMLGIIIGIASVVSIVVVGDAAKQMVLADIRAMGTNTIDIHPGKDFGDDNPQYRQALKYDDLVAIQKQPWVNSATPSVSKSLRLRYGNIDIAVNANGVSGDYFNVYGMSFREGNTFNAVQQQDRAQVVVLDANTRRQLFPNKANVVGEVVLVGNMPVIVIGVAEEKPSMYGNSNLLQVWLPYSTMSDRIMGQSWLNSITVRVKDGVDSDQAEQQLTRLLTLRHGKKDFFTWNMDSVLKTAEKTTYTLQLFLTLVAVISLVVGGIGVMNIMLVSVTERTREIGIRMAVGARASDVLQQFLIEAVLVCLVGGALGISLSMFIAFMLQLFLPGWEIGFSLTALASAFLCSTFTGILFGWLPARNAARLDPVDALARE

SEQ ID NO: 13996 - protein, 572 aa, Salmonella typhi
MKQTVAAFIAKTLEQAGVKQIWGVTGDSLNGLSDSLNRMGTIEWMPTRHEEVAAFAAGAQAQLTGELAVCAGSCGPGNLHLINGLFDCHRNHVPVLAIAAHIPSSEIGSGYFQETHPQELFRECSHYCELVSSPEQIPQVLAIAMRKAVLNRGVSVVVLPGDVALKPAPENAVTHWYHAPHPVVTPAEEELKKLAQLLRYSSNIALMCGSGCAGAHEELVALAAKLKAPIVHALRGKEHVEYDNPYDVGMTGLIGFSSGFHTMMNADTLILLGTQFPYRAFYPSDAKIIQIDINPGSIGAHSKVDMALVGDIKATLRALLPLVEEKSNRKFLDKALEHYRDARKGLDDLAKLSDKAIHPQYLAQQISHFAADDAIFTCDVGTPTVWAARYLKMNGKRRLLGSFNHGSMANAMPQALGAQATAPGRQVIAMCGDGGFSMLMGDFLSVVQMKLPIKIVVFNNSVLGFVAMEMKAGGYLTDGTELHDTNFARIAEACGITGIRVEKAADVDGALQRAFSIDGPVLVDVVVAKEELAIPPQIKLEQAKGFSLYMLRAIISGRGDEVIELAKTNWLR

SEQ ID NO: 13997 - protein, 224 aa, Salmonella typhi
MLSLHGDELAIPFDFIAPSLDVMLENLNNSLFYFINATPDSAQWIISLAIFIAKDVINIVPLLAVVLWLWGPRDRVCAQRQLIVKIGIALIISLAVSWTMGHLFPHDRPFVDHIGYNFLHHAADDSFPSDHGTVIFTFALAFLFWHRLWSGIVMMAIAMTIAWSRVYLGVHWPLDMIGALLVAMLGCLSAQLIWQWYGAPLYQALQRCYRFCFALPIRKGWVRD

SEQ ID NO: 13998 - protein, 413 aa, Salmonella typhi
MFMEFSAGLMPLETALTQMLSRITPLTAVETLPLMNCFGRILATDIVSPLDVPGFDNSAMDGYAVRVADLSADKPLPVAGKAFAGQPYQGEWPAGTCIRIMTGAPVPAGCEAVVMQEQTEQTDDGVRFTTDVRCGQNIRRRGEDIRQDAVVFPAGTRLTTAELPVLASLGIADAQVVRKVRVALFSTGDELQLPGQLLEAGQIYDTNRLTIHLMLQQLGCEVINLGIIPDDPGKLRAAFVDADSQADVVISSGGVSVGEADYTKTILEELGEIAFWKLAIKPGKPFAFGKLSNSWFCGLPGNPVSAALTFYQLVQPLLAKLGGNTASAVPPRQRVRTTSRLKKTPGRLDFQRGILQRSANGELEVTTTGHQGSHIFSSFNLGNCFIVLERERGNVEPGEWVEVEPFNALFGGL

SEQ ID NO: 13999 - protein, 531 aa, Salmonella typhi
  VARIANT (1)...(531): Xaa = Any Amino Acid
MLVSSNVTMQFGSKPLFENISVKFGGGNRYGLIGANGSGKSTFMKILGGDLEPTLGNVSLDPNERIGKLRQDQFAFETFTVLDTVIMGHGELWEVKQERDRIYALPEMSEEDGYKVADLEVKYGEMDGYSAEARAGELLLGVGIPLEQHYGLMSEVAPGWKLRVLLAQALFSNXDILLLDEPTNNLDIDTIRWLEQVLNERDSTMIIISHDRHFLNMVCTHMADLDYGDLRVYPGNYDEYMTAATQARERLLADNAKKKAQIAELQSFVSRFSANASKSRQATSRARQIDKIKLEEVKASSRQNPFIRFEQDKKLFRNALEVEALTKGFDNGPLFKNVNLLLEVGEKLAVLGTNGVGKSTLLKTLVGDLDADHGTVKWSENARIGYYAQDHEYEFENDLTVFEWMSQWKQEGDDEQAVRSILGRLLFSQDDIKKPAKVLSGGEKGRMLFGKLMMQKPNILIMDEPTNHLDMESIESLNMALELYQGTLIFVSHDREFVSSLATRVIEITPERVVDFSGNYDDYLRSKGIES

SEQ ID NO: 14000 - protein, 295 aa, Salmonella typhi
MPGSTRKLPVWLPILVLLIAMSSIQSGASLAKSLFPLVGAPGVTALRLALGTLILIAFFKPWRLRFAKEQRLPLLFYGLSLGGMNYLFYLSIQTVPLGIAVALEFTGPLAVALFSSRRPVDFIWVVLAVLGLWFLLPLGQDMSHVDLTGAALALGAGACWAVYILTGQRAGAEHGPATVAVGSLITAIIFVPIGAVQAGDALWHWSILPLGLAVAVLSTALPYSLEMIALTRLPTRTFGTLMSMEPVLAAISGMIFLGETLTGIQILALCAIIAASMGSTLTIRREPQIKQVDVK

SEQ ID NO: 14001 - protein, 751 aa, Salmonella typhi
MFCVSFLTGGVMRWTLFILFCLLGAPAHAVAIPGVTTGTSTSQQAAPEPSPEQKKAAYAALADVLENEASRNELIAQLREASTTPPTEPAPALAPPAAKDEKTVLENVTTVTRQYGDAFATRFAQLYRNITDAPYKPFNSQTFTNALTHFLFLAVAVFGFYSVIRLCALPLYRKMGLWARKKNRERSNWLQLPAMIAGAFIIDLLLLALTLFIGQMLSDNFHAGSRTIAFQQSLFLNAFALIEFFKAILRLIFCPNVPELRPFAIQDATARYWNRRMSSLSSLIGYGLIVAVPIISNQVNVQVGAMANVAIMLCITIWALYLIFKNKAEITQHLLSLAERSLAFFSLFIRAFALVWHWLASAYFIVLFFFSLFDPGNSLKFMMGATVRSLAIIGIAAFISGMFTRWIAKTITLSPHTQRNYPELQKRLNGWLSSALKVARFLTVCVAVMLLLNAWGLFDFWHWLHYGAGEKMVDILIRIALILFFSAVGWTILASLIENRLASDIHSRPLPSARTRTLLTLFRNALAVIISTITIMIVLSEIGVNIAPLLAGAGALGLAISFGSQTLVKDIITGVFIQFENGMNTGDLVTIGPLMGTVERMSIRSVGVRQDTGAYHIIPWSSITTFANFVRGIGSVVANYDVDRHEDADKANQALKDAVTALMETEDIRGLIIGEPTFAGIVGLTNTAFTLRVSFTTLPLKQWTVRFALDSQVKKHFDLANVRAPVQTYQVLPAPAGGPPPDSLPPREPTI

SEQ ID NO: 14002 - protein, 583 aa, Salmonella typhi
MTRHGMSEAVITLNGLTKRFAGMDKPAVAPLDCTIHSGYVTGLVGPDGAGKTTLMRMLAGQLKADGGSASVLGFDPIQNDSELHAVLGYMPQKFGLYEDLTVMENLNLYADLRSVTGEIREKTFARLLEFTALGPFTGRLAGKLSGGMKQKLGLACTLVGEPKVLLLDEPGVGVDPISRRELWQMVHELAGDGMLILWSTSYLDEAEQCRDVLLMNEGELLYQGEPKALTQTMAGRSFLMSSPQENNRKLLQRALRLPQVSDGMIQGRSVRLILKKEATAADIRQAEGMPEITLNETAPRFEDAFIDLLGGAGTSESPLGSILHTVEGTAGETVIEAQELTKKFGDFAATDHVNFVVQRGEIFGLLGPNGAGKSTTFKMMCGLLVPTSGKALVLDMDLKVSSGKARQHLGYMAQKFSLYGNLTVEQNLRFFSGVYGLRGRAQNEKIQRMSEAFGLKSIASHPTDALPLGFKQRLALACSLMHEPDILFLDEPTSGVDPLTRREFWLHINSMVEKGVTVMVTTHFMDEAEYCDRIGLVYRGKLIASGTPDDLKAQAADEQQADPTMEQAFITLINDWDKEHTHE

SEQ ID NO: 14003 - protein, 170 aa, Salmonella typhi
MSQVSAEFIPTRIAILTVSSRRGEEDDTSGHYLRDSAQEAGHEVVAKAIVKENRYAIRAQVSAWIASDEVQVVLITGGTGLTEGDQAPEALLPLFDREVEGFGEVFRMLSFEEIGTATLQSRAVAGVANNTLIFAMPGSTKACRTAWENIIAPQLDARTRPCNFHPHLKK

SEQ ID NO: 14004 - protein, 302 aa, Salmonella typhi
MRNRTLADLDRVVALGGGHGLGRVLSSLSSLGSRLTGIVTTTDNGGSTGRIRRSEGGIAWGDMRNCLNQLITEPSVASAMFEYRFGGNGELSGHNLGNLMLKALDHLSVRPLEAINLIRNLLKVDAQLIPMSELPVDLMAIDDQGHEIYGEVNIDQLATPPQEIMLTPNVPATREAVQAINDADLILIGPGSFYTSLMPCLLLDELAQALRRTPAPMVYIGNLGRELSLPAASLTLVDKLAMMEQYIGKKVIDTVVVGPRVDVSAVNDRLVIQEVLEASDIPYRHDRQLLHNALEKALQALG

SEQ ID NO: 14005 - protein, 702 aa, Salmonella typhi
MNSLFASTARGLEELLKIELEKLGAVGCQVVQGGVHFQGDTRLIYQSLMWSRLASRIILPMGECKVYSDLDLYFGVQAINWTEIFNPGATFAVHFSGLNDTIRNSQYGAMKVKDAIVDAFTRKNLPRPNVDRESPDLRINVWLNKETASIALDLSGDGLHLRGYRDRTGLAPIKETLAAAIVMRSGWQPGTPLLDPMCGSGTLLIEAAMWATDRAPGLHRGHWGFSGWAQHDEAIWQEVKAEAQTRARKGLAEYSSHFYGSDSDARVIERARSNARRAGIGELITFEVKDVAQLSNPLPKGPYGTVISNPPYGERLDSDPALIALHSLLGRTMKNQFGGWNLSLFSASPDLLGSLQLRADKQFKAKNGPLDCVQKNYHIAETTADSKPATVAEDYANRLRKNLKKLEKWARQEGIECYRLYDADLPEYNVAVDRYGDWAVIQEYAPPKTVDAQKARQRLFDIIAATLSVLGIPPNKLVLKTRERQKGKNQYQKMSEKGEFLEVSEYNARLWVNLTDYLDTGLFLDHRIARRMLGEMSKGKDFLNLFSYTGSASVHAGLGGARNTTTVDMSRTYLEWAERNLRLNGLSGRAHRLIQADCLGWLREANEQFDLIFIDPPTFSNSKRMEESFDVQRDHVALMKDLKRLLRKGGTIMFSNNKRGFRMDLEGLAELGLTAQEITQKTLSPDFARNRQIHNCWLIRAA

SEQ ID NO: 14006 - protein, 582 aa, Salmonella typhi
MHNDKDLSTWQTFRRLWPTIAPFKAGLIVAGIALILNAASDTFMLSLLKPLLDDGFGKTDRSVLLWMPLVVIGLMILRGITSYISSYCISWVSGKVVMTMRRRLFGHMMGMPVAFFDKQSTGTLLSRITYDSEQVASSSSGALITVVREGASIIGLFIMMFYYSWQLSIILVVLAPIVSIAIRVVSKRFRSISKNMQNTMGQVTTSAEQMLKGHKEVLIFGGQEVETKRFDKVSNKMRLQGMKMVSASSISDPIIQLIASLALAFVLYAASFPSVMDSLTAGTITVVFSSMIALMRPLKSLTNVNAQFQRGMAACQTLFAILDSEQEKDEGKRVIDRATGDLEFRNVTFTYPGREVPALRNINLKIPAGKTVALVGRSGSGKSTIASLITRFYDIDEGHILMDGHDLREYTLASLRNQVALVSQNVHLFNDTVANNIAYARTEEYSREQIEEAARMAYAMDFINKMDNGLDTIIGENGVLLSGGQRQRIAIARALLRDSPILILDEATSALDTESERAIQAALDELQKNRTSLVIAHRLSTIEQADEIVVVEDGIIVERGTHSELLAQHGVYAQLHKMQFGQ

SEQ ID NO: 14007 - protein, 557 aa, Salmonella typhi
  VARIANT (1)...(557): Xaa = Any Amino Acid
MTESFAQLFEESLKEIETRPGSIVRGVVVAIDKDVVLVDAGLKSESAIPAEQFKNAQGELEIQVGDEVDVALDAVEDGFGETLLSREXAKRHEAWITLXKAYEDAXTXTGXINXKVXGGFTVELNXIRAXLPXXLVDVRPVRDTLHLEGKELEFKVIKLDQKRNNVVVSRRAVIESENSAERDQLLENLQEGMEVKGIVKNLTDYGAFVDLGGXDGLLHITDMAWKRVKHPSEIVNVGDEINVKVLKFDRERTRVSLGLKQLGEDPWVAIAKRYPEGTKLTGRVTNLTDYGCFVEIEEGVEGLVHVSEMDWTNKNIHPSKVVNVGDVVEVMVLDIDEERRRISLGLKQCKSNPWQQFAETHNKGDRVEGKIKSITDFGIFIGLDGGIDGLVHLSDISWNVAGEEAVREYKKGDEIAAVVLQVDAERERISLGVKQLAEDPFNNWVALNKKGAIVTGKVTAVDAKGATVELADGVEGYLRASEASRDRVEDATLVLSVGDDVEAKFTGVDRKNRAISLSVRAKDEADEKDAIATVNKQEDANFSNNAMAEAFKAAKGE

SEQ ID NO: 14008 - protein, 281 aa, Salmonella typhi
  VARIANT (1)...(281): Xaa = Any Amino Acid
MKADNPFDLLLPAAMAKVAEEAGVYKATKHPLKTFYLAITAGVFISIAFVFYITATTGTGAMPYGMAKLIGGICFSLGLILCVICGADLFTSTVLIVVAKASGRITWGQLAKNWLNVYFGNLIGALLFVLLMWLSGEYMTANGQWGLNVLQTADHKMHHTFIEAVCLGILANLMVCLAVWMSYSGRSLMDKAFIMVLPVAMFVASGFEHSIANMFMIPMGIVIRDFATPEFWTAVGSSPESFSHLTVMSFITDNXIPXTIGNIIGGGLLVGXDILGHLPAW

SEQ ID NO: 14009 - protein, 1362 aa, Salmonella typhi
  VARIANT (1)...(1362): Xaa = Any Amino Acid
MLLSVLASGGKSLEPGEPFLSQEYTEDKDVTLTKLSSGRRLLEALLILIALFAVWLMAALLSFNPSDPSWSQTAWHEPIHNLGGAPGAWLADTLFFIFGVMAYTIPVIIVGGCWFAWRHQSTDDYIDYFAVSLRLIGVLALILTSCGLAAINADDIWYFASGGVIGSLLSTTLQPLLHSSGGTIMLLCIWAAGLTLFTGWSWVSIAEKLGGWLLNILTFASNRTRRDDTWVDDEEYDDEYDEETDGVQRESRRARILRGALARRKRLAEKFSNPRGRQTDAALFSGKRMDDDEDIQYSARGVAADPDDVLFSGNRATQSEYDEYDPLLNGHSVTEPVAAAAAATAVTQTWAASADPIMQTPPMPGAEPVVAQPTVEWQPVPGPQTGEPVIAPAPEGYQPHPQYAQPQEAQSAPWQQPVPVASAPQYAATPATAAEYDSLAPQETQPQWQAPDAEQHWQPEPIAAEPSHMPPPVIEQPVATEPEPGIEETRPARPPLYYFEEVEEXRAREREQLAAWYQPIPEPVKENVPVKPTVSVAPSIPPVEAVAAAASLDTGIKSGALAAGAAAAAPAFSLATGGAPRPQVKEGIGPQLPRPNRVRVPTRRELASYGIKLPSQRIAEEKAREAERNQYETGAQLTDEEIDAMHQDELARQFAQSQQHRYGETYQHDTQQAEDDDTAAEAELARQFAASQQQRYSGEQPAGAQPFSLDDLDFSPMKVLVDEGPHEPLFTPGVMPESTPVQQPVAPQPQYQQPVAPQPQYQQPQQPVASQPQYQQPQQPVAPQPQYQQPQQPVAPQPQYQQPQQPVAPQPQYQQPQQPVAPQPQYQQPQQPVAPQPQYQQPQQPTAPQDSLIHPLLMRNGDSRPLQRPTTPLPSLDLLTPPPSEVEPVDTFALEQMARLVEARLADFRIKADVVNYSPGPVITRFELNLAPGVKAARISNLSRDLARSLSTVAVRVVEVIPGKPYVGLELPNKKRQTVYLREVLDNAKFRENPSPLTVVLGKDIAGDPVVADLAKMPHLLVAGTTGSGKSVGVNAMILSMLYKAQPEDVRFIMIDPKMLELSVYEGIPHLLTEVVTDMKDAANALRWSVNEMERRYKLMSALGVRNLAGYNEKIAEAARMGRPIPDPYWKPGDSMDVQHPVLEKLPYIVVLVDEFADLMMTVGKKVEELIARLAQKARAAGIHLVLATQRPSVDVITGLIKANIPTRIAFTVSSKIDSRTILDQGGAESLLGMGDMLYSGPNSTMPVRVHGAFVRDQEVHAVVQDWKARGRPQYVDGITSDSESEGGGGGFDGGEELDALFDQAVNFVTQKRKASISGVQRQFRIGYNRAARIIEQMEAQGIVSAQGHNGNREVLAPPPFE

SEQ ID NO: 14010 - protein, 72 aa, Salmonella typhi; identical to SEQ ID NO: 10111

SEQ ID NO: 14011 - protein, 314 aa, Salmonella typhi
MYFTRPSAGGGVTRCRTNGNSMECVMRPRRSMLFIPGANAAMLSTSFVYGADAVMFDLEDAVALREKDTARLLVHHALQHPFYQDVEKVVRINPLNTPFGLADLEAVVRGGADIVRLPKTDSKNDVLELEAQVERIERECGREVGSTRLMAAIESAKGVVNAVDIATSSPRMVAIALAAFDYVMDMGTSRGDGTELFYARCAVLHAARVAGIAAYDVVWSDINNEEGFLKEVQLAKGLGFNGKSLVNPRQIELLHQAYSPTRKEVEHAHEVIAAAEEAESRGLGVVSLNGKMIDGPIIDHARKVVALSASGIRD

SEQ ID NO: 14012 - protein, 273 aa, Salmonella typhi
MHEAQIRVAIAGAGGRMGRQLIQAAMAMEGVQLGAALEREGSSLLGSDAGELAGAGKSGVIVQSSLEAVKDDFDVFIDFTRPEGTLTHLAFCRQHGKGMVIGTTGFDDAGKQAIREASQEIAIVFAANFSVGVNVMLKLLEKAAKVMGDYSDIEIIEAHHRHKVDAPSGTALAMGEAIAGALDKDLKDCAVYSREGYTGERVPGTIGFATVRAGDIVGEHTAMFADIGERVEITHKASSRMTFANGALRSALWLKTKKNGLFDMRDVLGLDVL

SEQ ID NO: 14013 - protein, 423 aa, Salmonella typhi
MALCLSGLHTAKNARRKTMNHLPMPTFGPLAGVRVVFSGIEIAGPFAGQMFAEWGAEVIWIENVAWADTIRVQPNYPQLSRRNLHALSLNIFKDEGREAFLKLMETTDIFIEASKGPAFARRGITDEVLWEHNPKLVIAHLSGFGQYGTEEYTNLPAYNTIAQAFSGYLIQNGDVDQPMPAFPYTADYFSGMTATTAALAALHKVRETGKGESIDIAMYEVMLRMGQYFMMDYFNGGEICPRMTKGKDPYYAGCGLYKCADGYIVMELVGITQINECFKDIGLAHILGTPEVPEGTQLIHRVECPYGPLVEEKLDAWLAAHTIADVQARFAELNIACAKVLTIPELEGNPQYVARESITQWQTMDGRTCKGPNIMPKFKNNPGKIWRGMPSHGMDTAAILKNIGYSEADIKELVGKGLAKVED

SEQ ID NO: 14014 - protein, 159 aa, Salmonella typhi
MISLIAALAVDRVIGMENAMPWNLPADLAWFKRNTLNKPVVMGRHTWESIGRPLPGRKNIIISSQPGTDDRVQWVKSVDEAIAACGDAPEIMVIGGGRVYEQFLPKAQKLYLTHIDAEVEGDTHFPDYEPDDWESVFSEFHDADAQNSHSYCFEILERR

SEQ ID NO: 14015 - protein, 273 aa, Salmonella typhi
MNNRVHQGHLARKRFGQNFLNDRFVIDSIVSAINPQKGQAMVEIGPGLAALTEPVGERLDKLTVIELDRDLAARLQTHPFLGPKLTIYQQDAMTMNFGELSAQLGQPLRVFGNLPYNISTPLMFHLFSYTDAIADMHFMLQKEVVNRLVAGPNSKAYGRLSVMAQYYCQVIPVLEVPPSAFTPPPKVDSAVVRLVPHATMPYPVKDIRVLSRITTEAFNQRRKTIRNSLGNLFSVETLTEMGIDPAMRAENISVAQYCQMANYLSENAPLKES

SEQ ID NO: 14016 - protein, 201 aa, Salmonella typhi
MAEKFTQHTGLVVPLDAANVDTDAIIPKQFLQKVTRTGFGAHLFNDWRFLDEKGQQPNPEFVLNFPEYQGASILLARENFGCGSSREHAPWALTDYGFKVVIAPSFADIFYGNSFNNQLLPVKLSDEQVDELFTLVKANPGIKFEVDLEAQVVKAGDKTYSFKIDDFRRHCMLNGLDSIGLTLQHEDAIAEYENKQPAFMR

SEQ ID NO: 14017 - protein, 466 aa, Salmonella typhi
  VARIANT (1)...(466): Xaa = Any Amino Acid
MAKTLYEKLFDAHVVFEAPNETPLLYIDRHLVHEVTSPQAFDGLRAHHRPVRQPGKTFATMDHNVSTQTKDINASGEMARIQMQELIKNCNEFGVELYDLNHPYXGIVHVMGPEQXVTLPGMXIVCGDSHTAXHGAFGALXFGIGTSEVEHVLATQTLKQGRAKTMKIEVTGNAAPGITAKDIVLAIIGKTGSAGGTGHVVEFCGDAIRALSMEGRMTLCNMAIEMGAKAGLVAPDETTFNYVKGRLHAPKGRDFDEAVEYWKTLKTDDGATFDTVVTLRAEEIAPQVTWGTNPGQVISVTDIIPDPASFSDPVERASAEKALAYMGLQPGVPLTDVAIDKVFIGSCTNSRIEDLRAAAEVAKGRKVAPGVQALVVPGSGPVKAQAEAEGLDKIFIEAGFEWRLPGCSMCLAMNNDRLNPGERCASTSNRNFEGRQGRGGRTHLVSPAMAAAAAVTGHFADIRSIK

SEQ ID NO: 14018 - protein, 173 aa, Salmonella typhi
MVKQNGEDLMMRRILSVLLENESGALSRVIGLFSQRGYNIESLTVAPTDDPTLSRMTIQTVGDEKVLEQIEKQLHKLVDVLRVSELGQGAHVEREIMLVKIQASGYGREEVKRNTEIFRGQIIDVTPTLYTVQLAGTSDKLDAFLASLRDVAKIVEVARSGVVGLSRGDKVMR

SEQ ID NO: 14019 - protein, 346 aa, Salmonella typhi
  VARIANT (1)...(346): Xaa = Any Amino Acid
MKRPGINRSRKISTLNSQLPKRYRSGCRTCLYKMMENFKHTTVLLDEAVNGLNIRPDGIYIDGTFGRGGHSRLILSQLGEEGRLLAIDRDPQAIAVAQTINDPRFSIIHGPFSALADYVAERELTGXIDGILLDLGVSSPQLDDAERGFSFMRDGPLDMRMDPTRGQSAAEWLQTAEEADIAWVLKTFGEERFAKRIAHAIVERNREQPMTRTKELAEVVAAATPVKDKFKHPATRTFQAVRIWVNSELEEIEQALKSSLSVLASGGRLSIISFHSLEDRIVKRFMREQSRGPQVPAGLPMTEAQLKKLGGRELRALGKLMPGEKEVAENPRARSSVLRIAERTNA

SEQ ID NO: 14020 - protein, 455 aa, Salmonella typhi
MPLRFYFVQKRSPPYAGDCPSHLCYPTRHFVFTVPGWNYHPARVTVCERLLRMTESTFPQYPRLVLSKGREKSLLRRHPWVFSGAVSRLEGKANLGETIDIVDHQGKWLARGAWSPASQIRARVWTFDKTESIDIAFFTRRLRQAQQWRDWLAKKDGLDSYRLIAGESDGLPGVTIDRFGHFLVLQLLSAGAEYQRAALISALQTCYPDCAIYDRSDVAVRKKEGMALTQGPVTGELPPALLPIEEHGMKLLVDIQGGHKTGYYLDQRDSRLVTRRYVENQRVLNCFSYTGGFAVSALMGGCRQVVSVDTSQDALDIARQNVELNQLDLSKAEFVRDDVFKLLRAYREHGEKFDVIIMDPPKFVENKSQLMGACRGYKDINMLAIQLLNPGGILLTFSCSGLMTSDLFQKIIADAAIDAGRDVQFIEQFRQAADHPVIATYPEGLYLKGFACRVM

SEQ ID NO: 14021 - protein, 97 aa, Salmonella typhi
MSIRPLHDRVIVKRKEVESKSAGGIVLTGSAAGKSTRGEIIAVGKGRILDNGTVQPLDVKVGDIVIFNDGYGVKSEKIDNEEVLIMSESDILAIVEA

SEQ ID NO: 14022 - protein, 429 aa, Salmonella typhi
MKGTVFAVALNHRSQLDAWQEAFSQPPYNAPPKTAVWFIKPRNTVIRHGEPIPYPQGEKVLSGATVALIVGKTASRIRPEAAADYIAGYALANEVSLPEESFYRPAIKAKCRDGFCPLGEMAPLSDVDNLTIITEINGREADHWNTADLQRSAAQLLSALSEFATLNPGDAILLGTPQNRVALRPGDRVRILAKGLPALENPVVAEDEFARHQTFTWPLSATGTLFALGLNYADHASELAFTPPKEPLVFIKAPNTFTEHHQTSVRPNNVEYMHYEAELVVVIGKTARKVSEAEAMEYVAGYTVCNDYAIRDYLENYYRPNLRVKSRDGLTPIGPWIVDKEAVSDPHNLTLRTFVNGELRQEGTTADLIFSIPFLISYLSEFMTLQPGDMIATGTPKGLSDVVPGDEVVVEVEGVGRLVNRIVSEESAK

SEQ ID NO: 14023 - protein, 283 aa, Salmonella typhi
MGKLALAAKITHVPSMYLSELPGKNHGCRQAAIDGHIEIGKRCREMGVDTIIVFDTHWLVNSAYHINCADHFQGVYTSNELPHFIRDMTYDYDGNPALGHLIADEAVKLGVRAKAHNIPSLKLEYGTLVPMRYMNSDKHFKVVSISAFCTVHDFADSRKLGEAILKAIEKYDGTVAVFASGSLSHRFIDDQRAEEGMNSYTREFDHQMDERVVKLWREGKFKEFCTMLPEYADYCYGEGNMHDTVMLLGMLGWDKYDGKVEFITDLFASSGTGQVNAVFPLPA

SEQ ID NO: 14024 - protein, 126 aa, Salmonella typhi
MPHFIAECTENIREQADLPSLFSKVNEALAATGIFPIGGIRSRAHWLDTWQMADGKHDYAFVHMTLKIGAGRSLESRQEVGEMLFGLIKAHFADLMENRYLALSFEIAELHPTLNYKQNNVHALFK

SEQ ID NO: 14025 - protein, 304 aa, Salmonella typhi
MPQSALKSRNYMEPQPPRLKPGKILDTLGAMQKSLTRASQRIAQYILAFPRQVTQSSIADLSRDTQAGEATVIRFCRTLGYKGFQDFKMDLAIELATTESDDSSPLLDAEVSESDDAHAIGLKLQNTISNVLSETLNLLDMQQVLGVVDALRHCHSVYIFGVGSSGITALDMKHKLMRIGLRGDAVSNNHFMYMQATLLKAGDVAMGVSHSGTSPETVHSLRLARQAGATTVAITHNLGSPLCEEADFCLINGNRQGMLQGDSIGTKAAQLFVFDLLYTLLVQSSPEQARESKLRTMNALDMTK

SEQ ID NO: 14026 - protein, 359 aa, Salmonella typhi
  VARIANT (1)...(359): Xaa = Any Amino Acid
MQAATVVINRRALRHNLQRLRELAPASKLVAVVKANAYGHGLLETARTLPDADAFGVARLEEALRLRAGGITQPILLLEGFFDAADLPTISAQCLHTAVHNQEQLAALEAVELAEPVTVWMKLDTGMHRLGVRPEEAEAFYQRLTHCKNVRQPVNIVSHFARADEPECGATEHQLDIFNAFCQGKPGQRSIAASGGILLWPQSHFDWARPGIILYGVSPLEHKPWGPDFGFQPVMSLTSSLIAVRDHKAGEPVGYGGTWVSERDTRLGVVAMGYGDGYPRAAPSGTPVLVNGREVPIVGRVAMDMICVDLGPNAQDNAGDPVVLWGEXLPVERIAEMTKVSAYELITRLTSRVAMKYID

SEQ ID NO: 14027 - protein, 289 aa, Salmonella typhi
MLTDTSTRLNKYISESGICSRREADRFIEQGNVFINGKRAAIGDQVVAGDVVKVNGRLIEPREADDLVLIALNKPVGIVSTTEDGERDNIVDFVNHSKRIFPIGRLDKDSQGLIFLTNHGDLVNKILRAGNDHEKEYLVTVDKPITDEFIRGMGAGVPILGTVTKKCKVKKEAPFVFRITLVQGLNRQIRRMCEYFGYEVTKLERTRIMNVSLSGIPLGEWRDLTDDELIDLFKLIEGSSSEAKPKAKAKPKTAGIKRPVVAIEKSNEKARPASSGKRFTSPGRKKKGR

SEQ ID NO: 14028 - protein, 471 aa, Salmonella typhi
  VARIANT (1)...(471): Xaa = Any Amino Acid
MAGNKPFNKPQTDARDRDPQVAGIKVPPHSIEAEQSVLGGLMLDNERWDDVAERVVAEDFYTRPHRHIFTEMGRLQESGSPIDLITLAESLERQGQLDSVGGFAYLAELSKNTPSAANISAYADIVRERAVVRDMIAVAHEIADAGYDPQGRNSDELLDLAESRVFQIAENRANKDEGPKSIDQILDATVARIEQLFQQPHDGVTGVDTGYQDLNKKTAGLQRSDLIIVAARPSMGKTTFAMNLCENAAMLQDKPVLIFSLEMPGEQIMMRMLASLSRVDQTRIRTGQLDDEDWARISGTMGILLEKRNMYIDDSSGLTPTEVRSRARRIFREHGGLSLIMIDYLQLMRVPSLSDNRTLEIAEISRSLKALAKELQVPVVALSQLNRSLEQRADKRPVNSDLRESGSIEQDADLIMXIYRDEVYHENSDLKGIAEIIIGKQRNGPIGTVRLTFNGQWSRFDNYAGPQYDDE

SEQ ID NO: 14029 - protein, 348 aa, Salmonella typhi
  VARIANT (1)...(348): Xaa = Any Amino Acid
MNGVTEIVIGSKDYHISFGGSMATRIEFHKHGGPEVLQTVEFTPTEPAEHEIQVENKAIGINFIDTYIRSGLYPPPSLPAGLGTEAAGVVSKVGSGVEHIRVGDRVVYAQSTRGANSAVHNIAADKAAILPDAMSFEQAAISILKGXTXFYLLRKTYEVKPDEPFLFHAAAGGVGLIACQWAKALGAKLIGTVGSAQKAQRALDAGAWQVINYREESIVERVKEITGGKKVRVVYDSVGKDTWEASLDCLQRRGLMVSFGNASGPVTGVNLGILNQKGSLYATRPSLQGYITTREELTEASNELFSLIASGVIKVDVAENQRYALKDARRAHEVLESRATQGSSLLIP

SEQ ID NO: 14030 - protein, 70 aa, Salmonella typhi
MMNKDEAGGNWKQFKGKMKEQWGKLTDDDMTVIEGKRDQLVGKIQERYGYQKDQAEKEVVDWETRNNYRW

SEQ ID NO: 14031 - protein, 376 aa, Salmonella typhi
MKVLTVFGTRPEAIKMAPLVHALEKDPHFEAKVCVTAQHREMLDQVLTLFSIVPDYDLNIMQPGQGLTEITCRILERLKPILADFKPDVVLVHGDTTTTIATSLAAFYQRIPVGHVEAGLRTGDLYSPWPEEANRTLTGHLAMYHFAPTENSRQNLLRENIPDERIFVTGNTVIDALIWVRDRVLTSDTLQAELAEQYPFLNANKKMILVTGHRRESFGQGFEHICQALAEIAAANQNVQIVYPVHLNPNVSEPVNRILGHVENVVLIEPQDYLPFVWLMNHAWLILTDSGGIQEEAPSLGKPVLVMRETTERPEAITAGTVRLIGTDSRRIVAEVMRLLHDENEYQTMSRAHNPYGDGQSCARILQALKSYRVSL

SEQ ID NO: 14032 - protein, 443 aa, Salmonella typhi
MDDPAIPFTTLSSRFTPSLRTHTIMNLTELKNTPVSELITLGESMGLENLARMRKQDIIFAILKQHAKSGEDIFGDGVLEILQDGFGFLRSADSSYLAGPDDIYVSPSQIRRFNLRTGDTISGKIRPPKEGERYFALLKVNEVNYDKPENARNKILFENLTPLHANSRLRMERGNGSTEDLTARVLDLASPIGRGQRGLIVAPPKAGKTMLLQNIAQSIAYNHPDCVLMVLLIDERPEEVTEMQRLVKGEVVASTFDEPASRHVQVAEMVIEKAKRLVEHKKDVIILLDSITRLARAYNTVVPASGKVLTGGVDANALHRPKRFFGAARNVEEGGSLTIIATALIDTGSKMDEVIYEEFKGTGNMELHLSRKIAEKRVFPAIDYNRSGTRKEELLTTQEELQKMWILRKIIHPMGEIDAMEFLINKLAMTKTNDDFFEMMKRS

SEQ ID NO: 14033 - protein, 491 aa, Salmonella typhi
MANYFNTLNLRQQLAQLGKCRFMGRDEFADGASYLQGKKVVIVGCGAQGLNQGLNMRDSGLDISYALRKEAIAEKRASWRKATENGFKVGTYEELIPQADLVVNLTPDKQHSDVVRSVQPLMKDGAALGYSHGFNIVEVGEQIRKDITVVMVAPKCPGTEVREEYKRGFGVPTLIAVHPENDPKGEGMAIAKAWAAATGGHRAGVLESSFVAEVKSDLMGEQTILCGMLQAGSLLCFDKLVAEGTDPAYAEKLIQFGWETITEALKQGGITLMMDRLSNPAKLRAYALSEQLKEIMAPLFQKHMDDIISGEFSSGMMADWANDDKKLLTWREETGKTAFETAPQFEGKIGEQEYFDKGVLMIAMVKAGVELAFETMVDSGIIEESAYYESLHELPLIANTIARKRLYEMNVVISDTAEYGNYLFSYACVPLLKPFMAELQPGDLGSAIPEGAVDNAQLRDVNDAIRSHAIEQVGKKLRGYMTDMKRIAVAG

SEQ ID NO: 14034 - protein, 616 aa, Salmonella typhi
MPKYRSATTTHGRNMAGARALWRATGMTDSDFGKPIITVVNSFTQFVPGHVHLRDLGKLVAEQIEASGGVAKEFNTIAVDDGIAMGHGGMLYSLPSRELIADSVEYMVNAHCADAMVCISNCDKITPGMLMASLRLNIPVIFVSGGPMEAGKTKLSDQIIKLDLVDAMIQGADPKVSDDQSNQVERSACPTCGSCSGMFTANSMNCLIEALGLSQPGNGSLLATHADRKQLFLNAGKRIVELTKRYYEQDDESALPRNIANKAAFENAMTLDIAMGGSTNTVLHLLAAAQEAEIDFTMSDIDKLSRKVPQLCKVAPSTQKYHMEDVHRAGGVLGILGELDRAGLLNRNVKNVLGLTLPQTLEQYDITVTQDEAVKKMFRAGPAGIRTTQAFSQDCRWDSLDDDRAAGCIRSLEYAYSKDGGLAVLYGNFAENGCIVKTAGVDDSILKFTGPVKVYESQDDAVEAILGGKVVEGDVVVIRYEGPKGGPGMQEMLYPTSFLKSMGLGKACALITDGRFSGGTSGLSIGHVSPEAASGGTIALIEDGDTIAIDIPNRSIQLQLSEAEIAARREAQEARGDKAWTPKNRQRQVSFALRAYASLATSADKGAVRDKSKLGG

SEQ ID NO: 14035 - protein, 548 aa, Salmonella typhi
  VARIANT (1)...(548): Xaa = Any Amino Acid
MNGAQWVVHALRAQGVKTVFGYPGGAIMPVYDALYDGGVEHLLCRHEQGAAMAAIGYARSTGKTGVCIATSGPGATNLITGLADALLDSVPVVAITGQVSAPFIGTDAFQEVDVLXLSLACTKHSFLMQSLAELPRIMADAFXXXNADSXXPVLVDIXXXIQLASGELXXWXTTVDNEATFPQADVEQARQMLEQAKKPMLYVGGGVGMAKAVPALRKFIAVTQMPVTCTLKGLGAVEADYPYYLGMLGMHGTKAANFAVQECDLLIAVGARFDDRVTGKLNTFAPNASVIHMDIDPAEMNKLRQAHVALQGDLNSLLPALQQPLKIDAWRQSCAELRAEHAWRYDHPGETIYAPLLLKQLSERKPADSVVTTDVGQHQMWSAQHMTYTRPENFITSSGLGTMGFGLPAAVGAQVARPNDTVICISGDGSFMMNVQELGTVKRKQLPLKIVLLDNQRLGMVRQWQQLFFQERYSETTLTDNPDFLMLASAFGIPGQHITRKDQVEAALDTMLASEGPYLLHVSIDELENVWPLVPPGASNSEMLEKLS

SEQ ID NO: 14036 - protein, 718 aa, Salmonella typhi
  VARIANT (1)...(718): Xaa = Any Amino Acid
MTRAAPDVEEVLSERALSQWAQAISHVAGHYRVACSPGSIQANAPWFRGKSRTTALTQLARQAGLSFHAPDIDKTAFSQWRLPLVVELXDGQLLVIEHVNGEDAVDVFVIEEEGQRNRLTLSELLPEILYVAALRPLSALKDSRVDRYISRFKPDWMRELVLQDIRPYLPVMVAAFLINVLSLAGIVFSMQVYDRVIPAQSYPTLYVLSFGVLVAVLFGFLLREARTHIMDVLGKRADMRISDRVFGHALRLRNSAIPRSTGSFISQLRELEQIREMITSSTLATIVDLPFFFLFMIVLAIIAPPLAWIAPVAALLMILPGVALQKKLAVLANQAAHEATLRNAVLVESVQGLEDIKLMQAENRFLQQWNSYIRITGESGLRTRKLTQRLISWGMSVQSLVYAAVIMFGAPMVIEGSMTTGAVVAASMLGSRMIAPMANLCGVLARWQQVKAAKMGLDNIMQLPTETQHDDSLIHRDILHGHYLFENAQFRYHNDDQRIPLRLVRLEIMPGERIAILGRNGAGKSTLLQAMAGGLEMIQGDARLDNLSLSHIDMADLRRNIGFLSQNARLFFGTLRENLTLGAPHANDEQIFDALEVSGGAVFVRRLAKGLDHPIMEGGNGLSGGQRQSLLLARMLLRSPNIVLLDEPSASLDEHTEREFIQRLHQWLGNRTLVVATHRVPILELVERVVVLKEGQLVMDAPKAQALNADRMQSHRRE

SEQ ID NO: 14037 - protein, 317 aa, Salmonella typhi
  VARIANT (1)...(317): Xaa = Any Amino Acid
MYTKIIGTGSYLPEQVRTNADLEKMVETSDEWIVTRTGIRERHIAAPNETVATMGFTAANRAIEMAGIDKDQIGLIVVATTSATHAFPSAACQIQSMLGIKGCPAFDVAAACAGXXYALSIADQYVRSGVVRHALVVGSDVLARTCDPGDRGTIIIFGDGAGAXVLSASEEPGIISTHLHADXXYGELLTXPNADRVNPDNPIYLTMAGNEVFKVAVTELAHIVDETLAANNLDRSELDWLVPHQANLRIISATAKKLGMSMDNVVVTLDRHGNTSAASVPCALDEAVRDGRIKAGQLVLLEAFGGGFTWGSALIRF

SEQ ID NO: 14038 - protein, 191 aa, Salmonella typhi
MKKNLLGFTLASLLFTTGSAVAAEYKIDKEGQHAFVNFRIQHLGYSWLYGTFKDFDGTFTFDEKNPSADKVNVTINTNSVDTNHAERDKHLRSAEFLNVAKFPQATFTSTSVKKEGDELDITGNLTLNGVTKPVTLEAKLMGQGDDPWGGKRAGFEAEGKIKLKDFNITTDLGPASQEVELIISVEGVQQK

SEQ ID NO: 14039 - protein, 350 aa, Salmonella typhi
MPVLHNRISNDELKAKMLAESEPRTTISFYKYFTIASPQQTRDALYQVFTALDVFGRVYLAHEGINAQISVPQSKVETFRQQLYTFDPALDGVRLNIALEDDGKSFWVLRMKVRDRIVADGIDDPSFDASNVGDYLKAADVNAMLDDPDAVFIDMRNHYEYEVGHFENALEIPADTFREQLPKAVEMLREHADKKIVMYCTGGIRCEKASAWMKHNGFNKVWHIEGGIIEYARRAREQGLPVRFIGKNFVFDERMGERISDEVIAHCHQCGVSCDSHTNCKNDGCHLLFIQCPQCASKFNGCCSEQCCEELALPEEEQRRRRAGRENGNKIFNKSRGRLNSKLSIPDPAE

SEQ ID NO: 14040 - protein, 342 aa, Salmonella typhi
MTHSLKPWNTFGIDHCAKHIVCAENEQQLLSAWQQATREGLPVMILGEGSNVLFLENYAGTVILNRLKGIEVNETADAWHLHVGAGENWHQLVRYALDNNMPGLENLALIPGCVGSSPIQNIGAYGVELHRVCDYVDCVELETGKRLRLSAAECRFGYRDSIFKNEYQDRVAIVAVGLRLSKQWQPVLTYGDLTRLDPKTVTAQQVFDAVCHMRTTKLPDPKVNGNAGSFFKNPVVAADIAMELLERFPNAPHYPQADGSVKLAAGWLIDQCQLKGVTIGGAAVHRQQALVLINANDATSKDVVALAHHVRQKVGEKFNVWLEPEVRFIGQFGEVNAVESIA

SEQ ID NO: 14041 - protein, 211 aa, Salmonella typhi
MYQPDFPTVPFRLGLYPVVDSVAWIERLLEAGVRTIQLRIKDKRDEEVEADVIAAIALGRCYDARLFINDYWRLAIKHNAYGVHLGQEDLETTDLKAIQAAGLRLGVSTHDDMEIDIALAAKPSYIALGHVFPTQTKQMPSAPQGLAQLARHIERLADYPTVAIGGISLERAPAVLATGVGSIAVVSAITQAADWRAATAQLLAIAGVGDE

SEQ ID NO: 14042 - protein, 1407 aa, Salmonella typhi
  VARIANT (1)...(1407): Xaa = Any Amino Acid
MKDLLKFLKAQTKTEEFDAIKIALASPDMIRSWSFGEVKKPETINYRTFKPERDGLFCARIFGPVKDYECLCGKYKRLKHRGVICEKCGVEVTQTKVRRERMGHIELASPTAHIWFLKSLPSRIGLLLDMPLRDIERVLYFESYVVIEGGMTNLERQQILTEEQYLDALEEFGDEFDAKMGAEAIQALLKSMDLEQECETLREELNETNSETKRKKLTKRIKLLEAFVQSGNKPEWMILTVLPVLPPDLRPLVPLDGGRFATSDLNDLYRRVINRNNRLKRLLDLAAPDIIVRNEKRMLQEAVDALLDNGRRGRAITGSNKRPLKSLADMIKGKQGRFRQNLLGKRVDYSGRSVITVGPYLRLHQCGLPKKMALELFKPFIYGKLELRGLATTIKAAKKMVEREEAVVWDILDEVIREHPVLLNRAPTLHRLGIQAFEPVLIEGKAIQLHPLVCAAYNADFDGDQMAVHVPLTLEAQLEARALMMSTNNILSPANGEPIIVPSQDVVLGLYYMTRDCVNAKGEGMVLTGPKEAERIYRAGLASLHARVKVRITEYEKDENGEFVAHTSLKDTTVGRAILWMIVPKGLPXSIVNQALGKKAISKMLNTCYRILGLKPTVIFADQTMYTGFAYAARSGASVGIDDMVIPEKKHEIISEAEAEVAEIQEQFQSGLVTAGERYNKVIDIWAAANDRVSKAMMDNLQTETVINRDGQEEQQVSFNSIYMMADSGARGSAAQIRQLAGMRGLMAKPDGSIIETPITANFREGLNVLQYFISTHGARKGLADTALKTANSGYLTRRLVDVAQDLVVTEDDCGTHEGILMTPVIEGGDVKEPLRDRVLGRVTAEDVLKPGTADILVPRNTLLHEQWCDLLEANSVDAVKVRSVVSCDTDFGVCAHCYGRDLARGHIINKGEAIGVIAAQSIGEPGTQLTMRTFHIGGAASRAAAESSIQVKNKGSIKLSNVKSVVNSSGKLVITSRNTELKLIDEFGRTKESYKVPYGAVMAKGDGEQVAGGETVANWDPHTMPVITEVSGFIRFTDMIDGQTITRQTDELTGLSSLVVLDSAERTTGGKDLRPALKIVDAQGNDVLIPGTDMPAQYFLPGKAIVQLEDGVQISSGDTLARIPQESGGTKDITGGLPRVADLFEARRPKEPAILAEIAGIVSFGKETKGKRRLVITPVDGSDPYEEMIPKWRQLNVFEGERVERGDVISDGPEAPHDILRLRGVHAVTRYIVNEVQDVYRLQGVKINDKHIEVIVRQMLRKATIESAGSSDFLEGEQVEYSRVKIANRELEANGKVGATFSRDLLGITKASLATESFISAASFQETTRVLTEAAVAGKRDELRGLKENVIVGRLIPAGTGYAYHQDRMRRRAAGEQPATPQVTAEDASASLAELLXAGLGGSDNE

SEQ ID NO: 14043 - protein, 1380 aa, Salmonella typhi
  VARIANT (1)...(1380): Xaa = Any Amino Acid
MIATGIAESIHFPVNKIVLHKLSPAGQMGRLVSELRNPMVYSYTEKKRIRKDFGKRPQVLDVPYLLSIQLDSFQKFIEQDPEGQYGLEAAFRSVFPIQSYSGNSELQYVSYRLGEPVFDVQECQIRGVTYSAPLRVKLRLVIYEREAPEGTVKDIKEQEVYMGEIPLMTDNGTFVINGTERVIVSQLHRSPGVFFDSDKGKTHSSGKVLYNARIIPYRGSWLDFEFDPKDNLFVRIDRRRKLPATIILRALNYTTEQILDLFFEKVVFEIRDNKLQMELIPERLRGETASFDIEANGKVYVEKGRRITARHIRQLEKDDIKHIEVPVEYIAGKVVSKDYVDESTGELICAANMELSLDLLAKLSQSGHKRIETLFTNDLDHGPYISETVRVDPTNDRLSALVEIYRMMRPGEPPTREAAESLFENLFFSEDRYDLSAVGRMKFNRSLLRDEIEGSGILSKDDIIDVMKKLIDIRNGKGEVDDIDHLGNRRIRSVGEMAENQFRVGLVRVERAVKERLSLGDLDTLMPQDMINAKPISAAVKEFFGSSQLSQFMDQNNPLSEITHKRRISALGPGGLTRERAGFEVRDVHPTHYGRVCPIETPEGPNIGLINSLSVYAQTNEYGFLETPYRRVVDGVVTDEIHYLSAIEEGNYVIAQANSNLDDEGHFVEDLVTCRSKGESSLFSRDQVDYMDVSTQQVVSVGASLIPFLEHDDANRALMGANMQRQAVPTLRADKPLVGTGMERAVAVDSGVTAVAKRGGTVQYVDASRIVIKVNEDEMYPGEAGIDIYNLTKYTRSNQNTCINQMPCVSLGEPVERGDVLADGPSTDLGELALGQNMRVAFMPWNGYNFEDSILVSERVVQEDRFTTIHIQELACVSRDTKLGPEEITADIPNVGEAALSKLDESGIVYIGAEVTGGDILVGKVTPKGETQLTPEEKLLRAIFGEKASDVKDSXLRVPNGVSGTVIDVQVFTRDGVEKDKRALEIEEMQLKQAKKDLSEELQILEAGLFSRIRAVLVSGGVEAEKLDKLPRDRWLELGLTDEEKQNQLEQLAEQYDELKHEFEKKLEAKRRKITQGDDLAPGVLKIVKVYLAVKRRIQPGDKMAGRHGNKGVISKINPIEDMPYDENGTPVDIVLNPLGVPSRMNIGQILETHLGMAAKGIGDKINAMLKQQQEVAKLREFIQRAYDLGADVRQKVDLSTFSDDEVLRLAENLRKGMPIATPVFDGAKEAEIKELLKLGDLPTSGQITLFDGRTGEQFERPVTVGYMYMLKLNHLVDDKMHARSTGSYSLVTQQPLGGKAQFGGQRFGEMEVWALEAYGAAYTLQEMLTVKSDDVNGRTKMYKNIVDGNHQMEPGMPESFNVLLKEIRSLGINIELEDE

SEQ ID NO: 14044 - protein, 121 aa, Salmonella typhi
  VARIANT (1)...(121): Xaa = Any Amino Acid
MSITKDQIIEAVSAMXVMDVVELXSAMEEKFGVSAAAAVAVAAGPAEAAEEKTEFDVILXAAGANKVAVIKAVRGATGLXLKEAKDLVESAPAALKEGVSKDDAEALKKSLEEAGAEVEVK

SEQ ID NO: 14045 - protein, 176 aa, Salmonella typhi
  VARIANT (1)...(176): Xaa = Any Amino Acid
MSSGXHPGAKLMALNLQDKQAIVAEVSEVAKGALSAVVADSRGVTVDXMTELRXAGREAGVYMRVVRNTLLRRVVEGTQFECLKDTFVXXTLIAYSMXHPGAAARLFKEFAKANAKXEVKAAAFEGELIPASQIDRXATLPTYEEAIARLMATMKEASAGKLVRTLAAVRDAKEAA

SEQ ID NO: 14046 - protein, 234 aa, Salmonella typhi
  VARIANT (1)...(234): Xaa = Any Amino Acid
MAXLTKRMRVIREKVDATKQYDINEAIALLKELATAKFNESVDVAVNLGIDARKSDQNVRGATVLPHGTGRSVRVAVFTQGPNAEAAKAAGAELVGMEDLADQIKKGEMNFEVVIASPDAMRVVGQLGQVLGPRGLMPNPKVGTVTPNVAEAVKNAKAGQVRYRNDKNGIIHTTIGKVDFDADKLKENLEALLVALKKAKPSQAKGVYIKXXSISTTMXAGVAVDQAXLSASAN

SEQ ID NO: 14047 - protein, 482 aa, Salmonella typhi
MQLNDSTLFRQQAFIDGDWRDARGGDVIPVSNPANGKPLGNVPKMGAEETRDAINAANRALPAWRALTAKERANILRRWFNLMMEHQDDLARLMTLEQGKPLAEAKGEISYAASFIEWFAEEGKRIYGDTIPGHQTDKRLLVIKQPIGVTAAITPWNFPSAMITRKAGPALAAGCTMVLKPASQTPFSALALAELAQRAGILAGVFNVVTGSAGDIGGELTSNPLVRKLSFTGSTEIGRQLMEQCAKDIKKVSLELGGNAPFIVFDDADLDKAVEGALASKFRNAGQTCVCANRLYVQDGVYDRFAEKLNQAVNKLAVGDGLQADVAIGPLIDEKAVAKVQEHIADALEKGARVITGGEAHKLGGNFFQPTILADVPDNAKVAKEETFGPLAPLFRFSDEADVIRQANDTEFGLAAYFYARDLSRVFRVGEALEYGIVGINTGIISNEVAPFGGIKASGLGREGSKYGIEDYLEIKYMCIGL

SEQ ID NO: 14048 - protein, 466 aa, Salmonella typhi
  VARIANT (1)...(466): Xaa = Any Amino Acid
MGQLSESHALGGGLKSRHVTMLSIAGVIGASLFVGSSVAIAEAGPAVLLAYLFAGLLVVMIMRMLAEMAVATPDTGSFSTYADKAIGPWAGYTIGWLYWWFWVLVIPLEANIAAIILNSWIPGIPVWLFSLVITLALTGSNLLSVKNYGEFEFWLALSKVIAILAFIALGAAAISGFYPYAEVSGISRLWDHGGFMPNGFGAVLSAMLITMFSFMGAEIVTIAAAESDTPDKHIVRATNSVIWRISIFYLCSIFVVVALIPWNMPGLKSVGSYRSVLELLHIPHAKFIMDCVILLSVTSCLNSALYTASRMLYSLSRRGDAPAIMGKTNRSKTPWVAVLLSTGAAFLTVIVNYYAPAKVFKFLIDSSGAIALLVYLVIAISQLRMRKILLAQGGEIKLKMWLYPWLTWLVIGFICFVLVVMLFRPAQQLXVISTGLLGLGIIGTVPIMSRWKKLIRWQKAPLQNLR

SEQ ID NO: 14049 - protein, 705 aa, Salmonella typhi
  VARIANT (1)...(705): Xaa = Any Amino Acid
MQETMDYHALNAMLNLYDKAGHIQFDKDQQAIDAFFAAHVRPHSVKFASQHERLETLVREGYYDDAVLARYDRAFVFRLFEHAHASGFRFQTFLGAWKFYTSYTLKTFDGKRYLEHFEDRVTMVALTLAQGDETLATQLTDEMLSGRFQPATPTFLNCGKQQRGELVSCFLLRIEDNMESIGRAVNSALQLSKRGGGVAFLLSNLREAGAPIKRIENQSSGVIPVMKMLEDAFSYANQLGARQGAGAVYLHAHHPDILRFLDTKRENADEKIRIKTLSLGVVIPDITFRLAKENAQMALFSPYDIQRRYGKPFGDIAISERYDELIADPHVRKTYINARDFFQTLAEIQFESGYLYIMFEDTVNRANPIAGRINMSNLCSEILQVNSASRYDDNLDYTHIGHDISCNLGSLNIAHVMDSPDIGRTVETAIRGLTAVSDMSHIRSVPSIAAGNAASHAIGLGQMNLHGYLAREGIAYGSPEALDFTNFYFYTITWHAVHTSMRLARERGKTFAGFAQSRYASGDYFTQYXQDDWQPKTAKVRALFARSGITLPTREMWLKLRDDVMRYGIYNQNLQAVPPTGSISYINHATSSIHPIVAKIEIRKEGKTGRVYYPAPFMTNENLDMYQDAYDIGPEKIIDTYAEATRHVDQGLSLTLFFPDTATTRDINKAQIYAWRKGIKSLYYIRLRQLALESTEIEGCVSCAL

SEQ ID NO: 14050 - protein, 409 aa, Salmonella typhi
MKTWTCIRMLTISVRKKLLIPMPRPRATSIKDCRSPCFSPIPPRPAISTKRRSMPGEKVLSHCITSDFASWRWKVLKLKAAYPARYKESHMKLSRISAINWNKIQDDKDLEVWNRLTSNFWLPEKVPLSNDIPAWQTLSAAEQQLTIRVFTGLTLLDTIQNIAGAPSLMADAITPHEEAVLSNISFMEAVHARSYSSIFSTLCQTKEVDAAYAWSEENPPLQRKAQIILAHYVSDEPLKKKIASVFLESFLFYSGFWLPMYFSSRGKLTNTADLIRLIIRDEAVHGYYIGYKHQIALQKLSAIEREELKLFALDLLMELYDNEICYTEALYAETGWVNDVKAFLCYNANKALMNLGYEALFPPEMADVNPAILAALSPNADENHDFFSGSGSSYVMGKTVETEDEDWNF

SEQ ID NO: 14051 - protein, 176 aa, Salmonella typhi
MDSSFTPIEQMLKFRASRHEDFPYQEILLTRLCMHMQGKLLENRNKMLKAQGINETLFMALITLESQENHSIQPSELSCALGSSRTNATRIADELEKRGWIERRESDNDRRCLHLQLTEKGQAFLQEVLPPQHHCLHQLWSSLSTAEKDQLEHITRKLLTRLDQMEQEGTVLEALR

SEQ ID NO: 14052 - protein, 404 aa, Salmonella typhi
  VARIANT (1)...(404): Xaa = Any Amino Acid
MXSPPRQSMRGGKFLISGVRMYALXQGRIFTGHGILDDHALVVADGLIDRVCPMAELPPGIERRSLNGAILSPGFIDVQLXGCGGVQFNDXAEXVSVETLEIMQKANEKSGCTNFLPTLITTSDELMKQGIRVMREYLEKHPHQALGLHLEGPWLNLVKKGTHNPDXVRKPDAALVDXLCDNADVITKXTLAPEMVPADVIAKLANAGIVVSAGHSNATLKEAKAGFRAGITFATHLFNAMPYITGREPGLAGAVLDEADXYCGVIADGLHVDYANIRNAKRLKGDKLCLVTDATAPAGANIEQFIFAGKTIYYRNGLCVDENGTLSGSSLTMIEGVRNLVAHCGIALDEVLRMATLYPARAIGVDKHLGSIAPSKVANLTAFTHDFKIIKTIVNGDEVVDLSK

SEQ ID NO: 14053 - protein, 150 aa, Salmonella typhi
  VARIANT (1)...(150): Xaa = Any Amino Acid
MTDXXTALKKAGLKVTLPRLKILEVLQEPDNHHVSAEDLYKRLIDMGEEIGLATVYRVLNQFDDAGIVTRHNFEGGKSVFELTQQHHHDHLICLDCGKVIEFSDDSIEARQREIAAKHGIRLTNHSLYLYGHCAEGDCREDEHAHDDATK

SEQ ID NO: 14054 - protein, 402 aa, Salmonella typhi
MSSVDILVPDLPESVADATVATWHKKPGDAVVRDEVLVEIETDKVVLEVPASADGILDAVLEEEGTTVTSRQILGRLREGNSAGKETSAKSEEKASTPAQRQQASLEEQNNDALSPAIRRLLAEHNLEASAIKGTGVGGRLTREDVEKHLAKGESKAPAVEPAAQPALGARGEKRVPMTRLRKRVAERLLEAKNSTAMLTTFNEVNMKPIMDLRKQYGEVFEKRHGIRLGFMSFYVKAVVEALKRYPEVNASIDGDDVVYHNYFDVSMAVSTPRGLVTPVLRDVDTLGMADIEKKIKELAVKGRDGKLTVEDLTGGNFTITNGGVFGSLMSTPIINPPQSAILGMHAIKDRPMAVDGKVEILPMMYLALSYDHRLIDGRESVGFLVTIKELLEDPTRLLLDV

SEQ ID NO: 14055 - protein, 933 aa, Salmonella typhi
MQNSALKAWLDSSYLSGSNQSWIEQLYEDFLTDPDSVDANWRLTFQQLPGTGVKPDQLHSKTREYFRRQALAGSRHSSTISDPDTNVKQVKVLQLINAYRFRGHQHANLDPLGLWKQERVADLDPSFHDLTEADFQETFNVGSFASGKETMKLGELLDALKQTYCGPIGAEYMHITSTEEKRWIQQRIESGRAAFSADEKKRFLNELTAAEGLERYLGAKFPGAKRFSLEGGDALIPMLKEMVRHAGNSGTREVVLGMAHRGRLNVLINVLGKKPQDLFDEFAGKHKEHLGTGDVKYHMGFSSDIETEGGLVHLALAFNPSHLEIVSPVVMGSVRARLDRLDEPSSNKVLPITIHGDAAVTGQGVVQETLNMSKARGYEVGGTVRIVINNQVGFTTSNPLDARSTPYCTDIGKMVQAPIFHVNADDPEAVAFVTRLALDFRNTFKRDVFIDLVCYRRHGHNEADEPSATQPLMYQKIKKHPTPRKIYADKLEADKVATLEDATEMVNLYRDALDAGECVVKEWRPMNMHSFTWSPYLNHEWDEAYPNKVEMKRLQELAKRISTVPEAIEMQSRVAKIYGDRQAMAAGEKLFDWGGAENLAYATLVDEGIPVRLSGEDSGRGTFFHRHAVIHNQTNGSTYTPLQHIHSGQGQFKVWDSVLSEEAVLAFEYGYATAEPRTLTIWEAQFGDFANGAQVVIDQFISSGEQKWGRMCGLVMLLPHGYEGQGPEHSSARLERYLQLCAEQNMQVCVPSTPAQVYHMLRRQALRGMRRPLVVMSPKSLLRHPLAVSTLDELANGSFQPAIGEIDELDPKAVKRVVMCSGKVYYDLLEQRRKNDQKDVAIVRIEQLYPFPHKAVQEALQPYAHVHDFVWCQEEPLNQGAWYCSQHHFREVIPFGAALRYAGRPASASPAVGYMSVHQKQQQDLVNDALNVD

SEQ ID NO: 14056 - protein, 289 aa, Salmonella typhi
MSVLINKDTNVICQGFTGSQGTFHSEQAIAYGTQMVGGVTPGKGGTTHLGLPVFNTVREAVEATGATASVIYVPAPFCKDSILEAIDAGIKLIITITEGIPTLDMLTVKVKLDEAGVRMIGPNCPGVITPGECKIGIMPGHIHKPGKVGIVSRSGTLTYEAVKQTTDYGFGQSTCVGIGGDPIPGSNFIDILKLFQEDPQTEAIVMIGEIGGSAEEEAAAYIKDHVTKPVVGYIAGVTAPKGKRMGHAGAIIAGGKGTADEKFAALEAAGVKTVRSLADIGEALKAIIK

SEQ ID NO: 14057 - protein, 282 aa, Salmonella typhi
MAGHSLWSLTAIFGVTMKLALLGRQALMGVMAVALVAGMSAKSFADEGLLNKVKERGTLLVGLEGTYPPFSFQGDDGKLTGFEVDFAEALAKHLGVKASLKPTKWDGMLASLDSKRIDVVINQVTISDVRKKKYDFSTPYTVSGVQALVKKGNEGTIKTAADLQGKKVGVGLGTNYEEWLRQHVQGVDIRTYDDDPTKYQDLRVGRIDAILVDRLAALDLVKKTKGTLAVTGDAFSRQESGVALRKGNEDLLKAVDNAIAEMQKDGTLKALSEKWFGADVTQ

SEQ ID NO: 14058 - protein, 182 aa, Salmonella typhi
MQFNIPTLLTLFRVILIPFFVVVFYLPFAWAPMVSALIFCIAAITDWFDGFLARRWNQSTRFGAFLDPVADKVLVAIAMVLVTEHYHSWWVTLPAATMIAREIIISALREWMAELGKRSSVAVSWIGKVKTTAQMVALAWLLWRPNIWVEYAGIALFFVAAVLTLWSMLQYLSAARGDLLDQ

SEQ ID NO: 14059 - protein, 712 aa, Salmonella typhi
  VARIANT (1)...(712): Xaa = Any Amino Acid
MYXKTXAGXWCPNDQTVLANXQVIDGCCWRCXTXXERKEIPQWFIKITAYADELLRDLDKLDHWPDTVKTMQRNWIGRSEGVEITFDVKGYDNTLTVYTTRPDTFMGATYLAVAAGHPLAQKAAANNAELAAFIDECRNTKVAEAEMATMEKKGVDTGYKAIHPLTGEEIPVWAANFVLMEYGTGAVMAVPGHDQRDYEFASKYGLTIKPVILAADGSEPDLSEQALTEKGVLFNSGEFDGLAFEAAFNAIADKLAEKGVGERKVNYRLRDWGVSRQRYWGAPIPMVTLEDGTVLPTPEDQLPVILPEDVVMDGITSPIKADPEWAKTTVNGMPALRETDTFDTFMESSWYYARYTCPQYQEGMLDSKAANYWLPVDIYIGGIEHAIMHLLYFRFFHKLMRDAGMVTSDEPAKQLLCQGMVLADAFYYVGENGERNWVSPVDAIVERDEKGRIVKAKDAAGHELVYTGMSKMSKSKNNGIDPQVMVERYGADTVRLFMMFASPADMTLEWQESGVEGANRFIKRVWKLVYEHTAKGPVAALNVDALSEDQKALRRDVHKTIAKVTDDIGRRQTFNTAIAAIMELMNKLAKAPQEGEQDRALLQEALQAVVRMLNPFTPHVCFTLWQELGGEGDIDNAPWPVADEQAMVENTTLVVVQVNGKVRGKITVAVDATEEQVRERAGQEHLVAKYLDGVTVRKVIYVPGKLLNLVVG

SEQ ID NO: 14060 - protein, 246 aa, Salmonella typhi
MSIDWNWGIFLQEAPFGNTTYLGWLWSGFQVTVALSITAWIIAFLVGSIFGILRTVPNRFLSGLGTLYVELFRNVPLIVQFFTWYLVVPELLPEDLGMWFKAELDPNIQFFLSSMICLGLFTAARVCEQVRAAIQSLPRGQKNAALAMGLTLPQAYRYVLLPNAYRVIVPPMTSEMMNLVKNSAIASTIGLVDMAAQAGKLLDYSAHAWESFTAITLAYVLINAVIMLVMSLVERKVRLPGNVGSK

SEQ ID NO: 14061 - protein, 552 aa, Salmonella typhi
MVTSSKWQWPIVVVLFRCMSGSRMTRPSQNWTNNSNSGLKMAFASLIERQRIRLLLALLFGACGTLAFSPYDVWPAAIVSLIGLQALTFNRRPLQSAAIGYCWGLGLFGSGINWVYVSIAQFGGMPGPVNVFLVVLLAAYLSLYTGLFAGILSRLWPKTNWLRVAIAAPAIWQITEFLRGWVLTGFPWLQFGYSQVDGPLKGLAPVMGVEAINFLLMMVSGLLALALATRNWRPLAVAVILFALPFPLRYIQWFTLEPTKATQVSLVQGDIPQSLKWDENQLLNTLNIYLNETRPELGKSQIIIWPESAIPDLEINQQPFLRSLDEMLREKNSTLITGIVDARLNKQNRYDTYNTIITLGKDNPYSYDSPNRYNKNHLVPFGEFVPLESILRPLAPFFDLPMSSFSRGPYIQPQLHAHDYKLTAAICYEIILGEQVRDNFRPDTDYLLTISNDAWFGKSIGPWQHFQMARMRSLELARPLLRSTNNGITAVIGPQGEIQAMIPQFTRQVLTTKVTPTTGLTPYARTGDWTVWLITVLFGFGALVMSLRQRRK

SEQ ID NO: 14062 - protein, 321 aa, Salmonella typhi
  VARIANT (1)...(321): Xaa = Any Amino Acid
MSKPIVMERGVKYRDADKMALIPVKNVVTERDALLRKPEWMKIKLPADSTRIQGIKAAMRKNGLHSVCEEASCPNLAECFNHGTATFMILGAICTRRCPFCDVAHGRPVAPDAEEPQKLAQTIADMALRYVVITSVDRDDLRDGGAQHFADCITAIRAKSPEIKIETLVPDFRGRMDRALDILNATPPDVFNHNLENVPRIYRQVRPGADYNWSLKLLERFXEAHPEIPTKXGLMVGLXXTNAXIIXXMRDLRRHXXTMLTLGQYLQPSRHHLPVQRYVSPEEFDEMIAEALAMGFTHAACWPFVRSSYHADLHAICMEVR

SEQ ID NO: 14063 - protein, 283 aa, Salmonella typhi
  VARIANT (1)...(283): Xaa = Any Amino Acid
MLFISGFAANQAVITALMKKNDRIVADRLSHAXXLEAANLSPAQLRRFIHNDTQHLSRLLQSPCVGQQLVVTEGVYSMDGDSAPLAEIQHIARRHHAWLLVDDAHGIGVTGDEGRGTCWQRGVKPELLVVTFGKGFGVSGAAVLCSESVADYLLQFARHLVYSTSMPPAQAQALSASLAVIRSDEGRERREKLAALVQRFRAGVNASRFTLLNAHSAIQPLIVGDNSRALRLAEALRQQGCWATAIRPPTVPVGTARLRLTLTQAHEACDIDRLLEVLHGAGE

SEQ ID NO: 14064 - protein, 456 aa, Salmonella typhi
  VARIANT (1)...(456): Xaa = Any Amino Acid
MLNSAMSVVILAAGKGTRMYSDIPKVLHTLAGKPMVQHVIDAATKLGAAQVHLVYGHGGELLKQTLKDDKLNWVLQAEQLGTGHAMQQAAPFFSDDEDILMLYGDVPLISVETLQRLRDAKPQGGIGLLTVKLDDPSGYGRITRENGKVTGIVEHKDATDEQRQIQEINTGILIANGADLKRWLSKLTNNNAQGEYYITDIIALAYQEGREIAAVHPARIXETDGVNNRLQLSRLERIYQAEQAEKLLLSGVMLRDPARFDLRGTLYCGMDVEIDANVIIEGYVTLGHRVKIXAGCIIKNSVIGXDCEISPYSVXEDAHLEAACTIGPFARLRPGAELLAGAHVGNFVEMKKARLGKGSKAGHLTYLGDAEIGDNVNIGAGTITCNYDGANKFKTVIGDDVFVGSDTQLVAPVTVGKGATIAAGTTVTRNVADNELVLSRVPQVHKQGWQRPVKKK

SEQ ID NO: 14065 - protein, 609 aa, Salmonella typhi
MCGIVGAIAQRDVAEILLEGLRRLEYRGYDSAGLAVVDAEGHMTRLRRLGKVQMLAQAAEEHPLHGGTGIAHTRWATHGEPSEANAHPHVSEHIVVVHNGIIENHEPLREALKARGYTFVSETDTEVIAHLVNWELKQGGTLRDAILRAIPQLRGAYGTVIMDTRHPDTLLAARSGSPLVIGLGMGENFIASDQLALLPVTRRFIFLEEGDIAEITRRSVNIFDNTGAEVKRQDIESNLQYDAGDKGIYRHYMQKEIYEQPNAIKNTLTGRISHGQVDLSELGPNADDLLSKVEHIQILACGTSYNSGMVSRYWFESLAGIPCDVEIASEFRYRKSAVRRNSLMITLSQSGETADTLAGLRLSKELGYLGSLAICNVPGSSLVRESDLALMTNAGTEIGVASTKAFTTQLTVLLMLVAKLSRLKGLDASIEHDIVHGLQALPSRIEQMLSQDKRIELLAEDFSDKHHALFLGRGDQYPIALEGALKLKEISYIHAEAYAAGELKHGPLALIDADMPVIVVAPNNELLEKLKSNIEEVRARGGQLYVFSDQDAGFVSSDNMHIIEMPHVEEVIAPIFYTVPLQLLAYHVALIKGTDVDQPRNLAKSVTVE

SEQ ID NO: 14066 - protein, 513 aa, Salmonella typhi
  VARIANT (1)...(513): Xaa = Any Amino Acid
MPNLVIFQQAVEYLIVENDRVVGALTQMGLKFRAKAVVLTVGTFLDGKIHIGLDNYSGGRAGDPPSIPLSRRLRELPLRVSRLKTGTPPRIDARTIDFSVLAQQHGDNPMPVFSFMGNAFQHPQQVPCYITHTNEKTHDVIRNNLDRSPMYAGVIEGIGPRYCPSIEDKVMRFADRNQHQIFLEPEGLTSNEIYPNGISTSLPFDVQMQIVRSMQGMENAKIVRPGYAIEYDFFDPRDLKPTLXSXXIHXLFFAGQINGTTGYEXAAAXGLLAGLNAARLSADXXGWAPARXXAYLGVLVDDLCTLGTKEPYRMFTSRAEYRLMLREDNADLRLTEMGRELGLVDDERWARFNEKLENIERERQRLKSTWVTPSAESADEVNAHLTTPLSREASGEDLLRRPEMTYAQLTSLAAFAPALEDEQAAEQVEIQVKYEGYIARQQDEIEKQLRNENTLLPATLDYRQVSGLSNEVIAKLNDHKPASIXPXIAYXRRYASGNLHSAGMAEKTRYAAS

SEQ ID NO: 14067 - protein, 271 aa, Salmonella typhi
  VARIANT (1)...(271): Xaa = Any Amino Acid
MASENMTPQEYIGHHLNNLQLDLRTFSLVDPQNPPATFWTLNIDSMFFSVVLGLLFLVMFRSVAKKATSGVPGKFQTAIELIVGFVHGSVKDMYHGKSKLIAPLXLTIFVWVFLMNLMDLLPIDLLPYIAEHWLGLPATRVVPSADVNITLSMALGVFILILFYSIKMKGIGGFAKELTLQPFNHWAFIPVNLILEGVSLLSKPVSLGLRLFGNMYAGELIFILIAGLLPWWSQWILNVPWAIFHILIITXQAFIFMVLTIVYLSMASEEH

SEQ ID NO: 14068 - protein, 156 aa, Salmonella typhi
  VARIANT (1)...(156): Xaa = Any Amino Acid
MNLNATIXGQAIAFILFVWFCMKYVWPPLMAAIEKRQKEIADGLASAERAHKDLDLAKASATDQLKKAKAEAQVIIEQANKRRAQILDEAKTEAEQERTKIVAQAQAEIEAERKRAREELRKQVAILAVAGAEKIIERSVDEAANSDIVDKLVAEL

SEQ ID NO: 14069 - protein, 513 aa, Salmonella typhi
MQLNSTEISELIKQRIAQFNVVSEAHNEGTIVSVSDGVIRIHGLADCMQGEMISLPGNRYAIALNLERDSVGAVVMGPYADLAEGMKVKCTGRILEVPVGRGLLGRVVNTLGAPIDGKGPVDNDGFSAVEAIAPGVIDRQSVDQPVQTGYKAVDSMIPIGRGQRELIIGDRQTGKTALAIDAIINQRDSGIKCIYVAIGQKASTISNVVRKLEEHGALANTIVVVATASESAALQYLAPYAGCAMGEYFRDRGEDALIIYDDLSKQAVAYRQISLLLRRPPGREAFPGDVFYLHSRLLERAARVNADYVEAFTKGEVKGKTGSLTALPIIETQAGDVSAFVPTNVISITDGQIFLESNLFNAGIRPAVNPGISVSRVGGAAQTKIMKKLSGGIRTALAQYRELAAFSQFASDLDDATRKQLDHGQKVTELLKQKQYAPMSVAQQSLVLFAAERGYLADVELAKIGSFEAALLAYVDRDHAPLMQEINQSGGYNDEIEGKLKGILDSFKATQSW

SEQ ID NO: 14070 - protein, 213 aa, Salmonella typhi
MGSNYIVIEGLEGAGKTTARDVVVETLEQLGIRNMIFTREPGGTQLAEKLRSLVLDIRSVGDEVITDKAEVLMFYAARVQLVETVIKPALAQGVWVIGDRHDLSTQAYQGGGRGIDQTMLATLRDAVLGDFRPDLTLYLDVTPEVGLKRARARGDLDRIEQESFDFFNRTRARYLELAAQDSRIRTIDATQPLDAVMRDIRATVTKWVQEQAA

SEQ ID NO: 14071 - protein, 207 aa, Salmonella typhi
  VARIANT (1)...(207): Xaa = Any Amino Acid
MWSFXCGVHPLNQDEVYDVEELRLLAAEDDVVAMGETGLDYFYTPETKIRQQASFIHHIQIGRELHKPVIVHTRDARADTLAILREEKVTDCGGVLHCFTEDRETAGKLLDLGFYISFSGIVTFRNAEQLRDAARYVPLDRLLVETDSPYLAPVPHRGKENQPAMVRDVAEYMAVLKGVAVEELAQITTDNFARLFHIDASRLSSIR

SEQ ID NO: 14072 - protein, 271 aa, Salmonella typhi
  VARIANT (1)...(271): Xaa = Any Amino Acid
MATKLQDENTPCLAATPSEPRPTVLVFDSGVGGLSVYDEIRRLLPDLHYIYAFDNVAXPYXEKSXTFIVERVVEIVTAVQQRYPLSLAVIACNTASTVSLPALREKFAFPVVGVVPAIKPAARLTANGVVGLLATRATVKRPYTHELIARFANECQIAMLGSAELVELAEAKLHGDSVSLEELRRILRPWLRMPEPPDTVVLGCTHFPLLRDELLQVLPEGTRLVDSGAAIARRTAWLLXHEAPDAKSTDANIAYCMAMTPGAEQLLPVLH

SEQ ID NO: 14073 - protein, 484 aa, Salmonella typhi
  VARIANT (1)...(484): Xaa = Any Amino Acid
MWVAGLPARELREMTLDSRVAAAGDLFVAVVGHQADGRRYIPXAIAQGVAAIIAEAKDEASDGEIREMHGVPVVYLSQLNERLSALAGRFYHEPSENMRLVAVTGTNGKTTTTQLLAQWSQLLGETSAVMGTVGNGLLGKVIPTENTTGSAVDVQHVLASLVAQGATFGAMEVSSHGLVQHRVAALKFAASVFTNLSRDHLDYHGDMAHYEAAKWMLYSTHHHGQAIVNADDEVGRRWLASLPDAVAVSMEGHINPNCHGRWLKAEAVEYHDRGVTIRFASSWGEGEIESCLMGAFNVSNLLLALATLLALGYPLTDLLKTAARLQPVCGRMEVFTAPGKPTVVVDYAHTPDALEKALQAARLHCAGKLWCVFGCGGDRDKGKRPLMGAIAEEFADIVVVTDDNPRTEEPRAIINDILAGMLDAGQVRVMEGRAEAVTNAIMQAKDNDVVLIAGKGHEDYQIVGTQRLDYSDRVTAARLLGVIA

SEQ ID NO: 14074 - protein, 452 aa, Salmonella typhi
  VARIANT (1)...(452): Xaa = Any Amino Acid
MISVTLSKIADVLGAEHRGADLTLDTVITDTRKVTPGCLFVALKGERFDAHDFADKAKAXGAGALLVSRPLDIDLPQVIVKDTRQAFGQLAAWVRMQVPARVVALTGSSGKTSVKEMTAAILSQCGNTLYTASNFNNDIGVPITLLRLNHDYDYAVIELGANHQGEIAWTVSLTRPEAALVNNLAAAHLEGFGSLAGVAKAKGEIYTGLPENGIAIMNADNNDWLNWQSIIGDRQVWRFSPNAANSDFTAANIHVTSHGTEFTLQTPMGSIDVLLPLPGRHNIANALAAAALSMAVGATLAAVKAGLAALKAVPGRLFPIQLSENQLVLDDAYNANVGSMTAAVQVLSEMPGYRVLVVGDMAELGAESEACHLQVGEAAKAAGIDRVLSTGKLSQVISHASGVGEHFADKAALIARLHALLQEQPMMTILVKGSRSAAMEDVVHALQEKGSC

SEQ ID NO: 14075 - protein, 360 aa, Salmonella typhi
  VARIANT (1)...(360): Xaa = Any Amino Acid
MLVWLAEHLVKYYSGFNVFSYLTFRAIVSLLTALFISLWMGPRMIARLQKLSFGQVVRNDGPESHFSKRGTPTMGGIMILTAIVISVLLWAYPSNPYVWCVLVVLIGYGIIGFVDDYRKVVRKDTKGLIARWKYFWMSVIALGVAFALYLVGKDTPATQLVVPFFKDVMPQLGLFYILLSYFVIVGTGNAVNLTDGLDGLAIMPTVFVAAGFALVAWATGNMNFANYLHIPYLRHAGELVIVCTAIVGAGLGFLWFNTYPAQVFMGDVGSLALGGALGIIAVLLRQEFLLVIMGGVFVVETLSVILQVGSFKLRGQRIFRMAPIHHHYELKGWPEPRVIVRFWIISLMLVLIGLATLXVR

SEQ ID NO: 14076 - protein, 438 aa, Salmonella typhi
MADYQDKNVVIIGLGLTGLSCVDFFLARGVTPRVMDTRVTPPGLDKLPQEVERHVGGLNDEWLLAADLIVASPGIALAHPSLSAAASAGVEIVGDIELFCREAQAPIVAITGSNGKSTVTTLVGEMAKAAGVNVGVGGNIGLPALMLLDADRELYVLELSSFQLETTSSLQAAAATVLNVTEDHMDRYPFGLQQYRAAKLRVYEKAKVCVVNADDALTMPVRGADERCVSFGVNMGDYHLNRQQGETWLRVKGEKVLNVKEMKLSGQHNYTNALAALALADAVGLPRASSLKALTTFTGLAHRFQLALEHNGVRWINDSKATNVGSTEAALNGLHVDGTLHLLLGGDGKSADFSPLARYLTGDRIRLYCFGRDGAQLAALRPEIAQQTETMEEAMRLLAPHVQPGDMVLLSPACASLDQFKNFEQRGDVFTRLAKELG

SEQ ID NO: 14077 - protein, 414 aa, Salmonella typhi
MRLSLPRLRMPRVPGFGLLAWLFAALKGWVMASRDKDADSLIMYDRTLLWLTFGLAAIGFVMVTSASMPVGQRLANDPFLFAKRDALYIFLAFCLAMVTLRLPMTFWQKYSTTMLIASIIMLLIVLVVGSSVNGASRWIALGPLRIQPAEFTKLSLFCYLANYLVRKVDEVRNNLRGFLKPMGVILVLAVLLLAQPDLGTVVVLFVTTLAMLFLAGAKLWQFIAIIGMGISAVILLILAEPYRIRRVTSFWNPWEDPFGSGYQLTQSLMAFGRGEIWGQGLGNSVQKLEYLPEAHTDFIFAIIGEELGYIGVVLALLMVFFVAFRAMSIGRKALEIDHRFSGFLACSIGIWFSFQALVNVGAAAGMLPTKGLTLPLISYGGSSLLIMSTAIMFLLRIDYETRLEKAQAFTRGSR

SEQ ID NO: 14078 - protein, 355 aa, Salmonella typhi
MSGQPKRLMVMAGGTGGHVFPGLAVAHHLMAQGWQVRWLGTSDRMEADLVPKHGIDIDFIRISGLRGKGVKALLAAPLRIFNAWRQARAIMKRFKPDVVLGMGGYVSGPGGLAAWSLGIPVVLHEQNGIAGLTNQWLAKIATTVMQAFPGAFPNAEVVGNPVRTDVLALPLPQVRLAGRDGPIRVLVVGGSQGARVLNQTMPQVAARLGDTVTIWHQSGKGAQLTVEQAYAGAGQPQHKVTEFIDGMAAAYAWADVVVCRSGALTVSEIAAAGLPAIFVPFQHKDRQQYWNALPLENAGAAKIFEQPQFTVEAVADTLAGWSREALLTMAERARAVSIPDATERVASEVSRVART

SEQ ID NO: 14079 - protein, 491 aa, Salmonella typhi
  VARIANT (1)...(491): Xaa = Any Amino Acid
MNTQQLAKLRSIVPEMRRVRHIHFVGIGGAGMGGIAEVLANEGYQISGSDLAPNPVTQQLTSLGATIFFNHRPENVRDASVVVVSSAISADNPEIVAAHEARIPVIRRAEMLAELMRFRHGIAIAGTHGKTTTTAMVSSIYAEAGLDPTFVNGGLVKAAGVHARLGHSRYLIAEADESDASFLHLQPMVAIVTNIEADHMDTYHGDFENLKQTFINFLHNLPFYGRAVMCVDDPVIRELLPRVGRQTTTYGFSEDADVRVEDYQQIGPQGHFTLLRQGMPDLHVTLNAPGRHNALNAAAAVAVATEEGIDDDAILRALXSFQGTGRRFDFLGEFPLEPVNGKAGTAMLVDDYGHHPTEVDATIKAARAGWPDKNLVMLFQPHRYTRTRDLYDDFANVLTQVDALLMLDVYPAGEAPIPGADSRSLCRTIRNRGKIDPILVSDPAQVATMLAPVLTGNDLILVQGAGNVGKIARYLSEIKLKPQIQEEEQHG

SEQ ID NO: 14080 - protein, 663 aa, Salmonella typhi
  VARIANT (1)...(663): Xaa = Any Amino Acid
MFGKLSLDAVPFHEPIVMVTIAAIIVGGLAILAAITYFGKWTYLWKEWLTSVDHKRLGIMYIIVAIVMLLRGFADAIMMRSQQALASAGEAGFLPPHHYDQIFTAHGVIMIFFVAMPFVIGLMNLVVPLQIGARDVAFPFLNNLSFWFTVVGVILVNLSLGVGEFAQTGWLAYPPLSGIEYSPSVGVDYWIWALQLSGIGTTLTGINFFVTILKMRAPGMTMFKMPVFTWASLCANVLIIASFPILTVTVALLTLDRYLGTHFFTNDMGGNMMMYINLIWAWGHPEVYILILPVFGVFSEIAATFSRKRLFGYTSLVWATVCITVLSFIVWLHHFFTMGAGANVNAFFGITTMIIAIPTGVKIFNWLFTMYQGRIVFHSAMMWTIGFIVTFSVGGMTGVLLAVPGADFVLHNSLFLIAHFHNVIIGGVVFGCFAGMTYWWPKAFGFKLNETWGKRAFWFWIIGFFVAFMPLYVLGFMGMTRRLSQQIDPQFHTMLMVAAAGAALIALGILCQLIQIFVSIRDRDQNRDLTGDPWGGRTLEWSTSSPPPFYNXAVVPHVHXRDAFWEMKEKGEAYQQPGQYEEIHMPKNSGAGIVIAAFATVFGFAMIWHIWWLAIVGFAGMIISWIVKSFDEDVDYYVPVPEVEKLENQHFDEITKAGLKNGN

SEQ ID NO: 14081 - protein, 318 aa, Salmonella typhi
  VARIANT (1)...(318): Xaa = Any Amino Acid
MRLRKYNKSLGWLSLIAGTALLSGCNSALLDPKXQXXLXQRSLXLTAFGLMLIVVIPAILMAVGFAWKYRASNKXAKYXPNWSHSNKVEAVVWTVPILIIIFLAVLTCKTTHALEPSKPLAHDXKPITIXVVSMDWXWFFIYPEQGIATVNEIAFPANTPVYFKVTSNSVXNSFFIPRLGSQIYAMAGMQTRLHLIANEPGTYDGISASYSGPGFSGMKFKAIATKDRAEFDQWVAKAKQSPNTMNDMAAFEKVAMPSEYNKVEYFSSVKPDLFKDVINKFMGHGKSMDMTQPEGEHSSHEGMEGMDMSHAESANSKG

SEQ ID NO: 14082 - protein, 324 aa, Salmonella typhi
  VARIANT (1)...(324): Xaa = Any Amino Acid
MQYNTLGNTDLRVSRLCLGCMTFGEPSRGNHAWTLPEESSRPIIKRAXEGGINFFDTANSYSDGSSEEIVGRALRDFARRDEVVVATKVFHRVGDLPEGLSRAQILRSIDDSLTRLGMEYVDILQIHRWDYTTPIEETLEALNDVVKAGKARYIGASSMHASQFAQALALQKQHGWAPFVTMQDHYNLIYREEEREMLPLCWQEGVAVIPWSPLARGRLTRPWGETTARLASDDVGKNLYDESDKNDAQIAERLAGVSEALGATRAQVALAWLLSKRGVAAPIIGASREEQLDELLNAVDLTLKPEQIAELETPYKQHPVVGFK

SEQ ID NO: 14083 - protein, 620 aa, Salmonella typhi
MSFDIAKYPTLALVDSTQELRLLPKESLPKLCDELRRYLLDSVSRSSGHFASGLGTVELTVALHYVYNTPFDQLIWDVGHQAYPHKILTGRRDKIGTIRQKGGLHPFPWRGESEYDVLSVGHSSTSISAGIGIAVAAEKEGKDRRTVCVIGDGAITAGMAFEAMNHAGDIRPDMLVILNDNEMSISENVGALNNHLARLLSGKLYSSLREGGKKVFSGVPPIKELLKRTEEHIKGMVVPGTLFEELGFNYIGPVDGHDVMGLISTLKNMRDLKGPQFLHIMTKKGRGYEPAEKDPITFHAVPKFDPSSGCLPKSSGGLPGYSKIFGDWLCETAAKDSKLMAITPAMREGSGMVEFSRKFPDRYFDVAIAEQHAVTFAAGLAIGGYKPVVAIYSTFLQRAYDQVIHDVAIQKLPVMFAIDRAGIVGADGQTHQGAFDLSYLRCIPDMVIMTPSDENECRQMLFTGYHYNDGPTAVRYPRGNAQGVALTPLEKLPIGKGLVKRHGEKLAILNFGTLMPEAAKVAEALNATLVDMRFVKPLDDTLILEMAAQHDALVTLEENAIMGGAGSGVNEVLMAHRKPVPVLNIGLPDFFIPQGTQEEARAELGLDAAGIEAKIKAWLA

SEQ ID NO: 14084 - protein, 299 aa, Salmonella typhi
MDFTQQLQACVTQANQALSRFIAPLPFQNTPVVEAMQYGALLGGKRLRPFLVYATGQMFGVSTATLDAPAAAVECIHAYSLIHDDLPAMDDDDLRRGLPTCHIKFGEANAILAGDALQTLAFTIISDAPMPEVADRDRIAMIAELANASGIAGMCGGQALDLAAEGQRITLDALERIHRHKTGALIRAAVRLGALSAGDKGRNTLPILDRYAESIGLAFQVQDDILDVVGDTATLGKRQGADQQLGKSTYPALLGLEQARNKARDLIEDARQSLHQLAAQSLDTSALEALANYIIQRDK

SEQ ID NO: 14085 - protein, 255 aa, Salmonella typhi
MFIGIVSLFPEMFRAITDYGVTGRAVKKGLLNIQSWSPRDFAHDRHRTVDDRPYGGGPGMLMMVQPLRDAIHAAKAAAGEGAKVIYLSPQGRKLDQAGVSELATNQKLILVCGRYEGVDERVIQAEIDEEWSIGDYVLSGGELPAMTLIDSVARFIPGVLGHEASAIEDSFADGLLDCPHYTRPEVLEGMEVPPVLLSGNHAEIRRWRLKQSLGRTWLRRPELLENLALTEEQARLLAEFKTEHAQQQHKHDGMA

SEQ ID NO: 14086 - protein, 115 aa, Salmonella typhi
  VARIANT (1)...(115): Xaa = Any Amino Acid
MSNIIKQLEQEQMKQNVPSFRPGDTVEVKVWVVEGTKKRLQAFEGVVIAIRNRGLHSAFTVRKISNGEGVERVFQTHSPVVDSIAVKRRGAVRKAKLYYXRERTGKAAXIKERLN

SEQ ID NO: 14087 - protein, 326 aa, Salmonella typhi
  VARIANT (1)...(326): Xaa = Any Amino Acid
MAQRVQLTATVSENQLGQRLDQALAEMFPDYSRSRIKEWILNQRVLVNGQLCDKPKEKVLGGERVAIDAEIDEEIRFEAQDIPLDIVYEDDDILVINKPRDLVVHPGAGNPDGTVLNALLHYYPPIADVPRAGIVHRLDKDTTGLMVVAKTVPAQTRLVESLQLREITREYEAVAIGHMTAGGTVNEPISRHPTKRTHMSVHPMGKPAVTHYRIMEHFRVHTRLRLRLETGRTHQIRVHMAHITHPLVGDQVYGGRPRPPKGASEEXISTLRKFDRQALHATMLRLYHPVXGIEMEWHAPIPQDMVDLIDAMRADFEDHKDDVDWL

SEQ ID NO: 14088 - protein, 861 aa, Salmonella typhi
  VARIANT (1)...(861): Xaa = Any Amino Acid
MGGVMRLDRLTNKFQLALADAQSLALGHDNQFIEPLHLMSALLNQEGGSIRPLLTSAGINAGQLRTAIDQALSRLPQVEGTGGDVQPSSELVRVLNLCDKLAQKRGDNFISSELFVLAALESRGTLTDLLKSAGATTANITQAIEQMRGGESVNDQGAEDQRQALKKYTVDLTERAEQGKLDPVIGRDEEIRRTIQVLQRRTKNNPVLIGEPGVGKTAIVEGLAQRIINGEVPEGLKXRRVLALDMGALVAGAKYRGEFEERLKGVLNDLAKQEGNVILFIDELHTMVGAGKADGAMDAGNMLKPALARGELHCVGATTLDEYRQYIEKDAALERRFQKVFVAEPSVEDTIAILRGLKERYELHHHVQITDPAIVAAATLSHRYIADRQLPDKAIDLIDEAASSIRMQIDSKPEELDRLDRRIIQLKLEQQALMKESDEASKKRLDMLNEELDDKERQYSELEEEWKAEKASLSGTQTIKAELEQAKIAIEQARRVGDLARMSELQYGKIPELEKQLEAATQSEGKTMRLLRNKVTDAEIAEVLARWTGIPVSRMLEGEREKLLRMEQELHSRVIGQNEAVEAVSNAIRRSRAGLSDPNRPIGSFLFLGPTGVGKTELCKALANFMFDSDDAMVRIDMSEFMEKHSVSRLVGAPPGYVGYEEGGYLTEAVRRRPYSVILLDEVEKAHPDVFNILLQVLDDGRLTDGQGRTVDFRNTVVIMTSNLGSDLIQERFGELDYGRMKEMVLGVVSQNFRPEFINRIDEVVVFHPLGEQHIASIAQIQLQRLYKRLEERGYEIHISDEALKLLSANGYDPVYGARPLKRAIQQQIENPLAQQILSGELVPGKVIRLEANDDRIVAVQ

SEQ ID NO: 14089 - protein, 501 aa, Salmonella typhi
  VARIANT (1)...(501): Xaa = Any Amino Acid
MRKRSSIALRDRSSNRCITTKTASWYTVAKFCNCVAAATNXFHPRREXMFDNLTDRLSRTLRNISGRGRLTEDNVKETLREVRMALLEADVALPVVREFINRVKEKAVGHEVNKSLTPGQEFVKIVRSELVAAMGEENQTLNLAAQPPAVVLMAGLQGAGKTTSVGKLGKFLREKHKKKVLVVSADVYRPAAIKQLETLAEQVGVDFFPSDVGQKPVDIVNAALKEAKLKFYDVLLVDTAGRLHVDEAMMDEIKQVHASIKPVETLFVVDAMTGQDAANTAKAFNEALPLTGVVLTKVDGDARGGAALSIRHITGKPXXFXGXGEXTDALEXFHPDXIAXXIXGMGDVLSLIEDIESKVDRAQAEKLATKLKKGDGFDLNDFLEQLKQMKNMGGMASLMGKLPGMGQIPDNVXSQMDDKVLVRMEAIINSMTLKERAKPEIIKGSRKRRIAQGCGMQVQDVNRLLKQFDDMQRMMKKMKKGGMAKMMRSMKGMMPPGFPGR

SEQ ID NO: 14090 - protein, 82 aa, Salmonella typhi
MVTIRLARHGAKKRPFYQVVVTDSRNARNGRFIERVGFFNPIASEKEEGTRLDLDRIAHWVGQGATISDRVAALIKEVKKAA

SEQ ID NO: 14091 - protein, 581 aa, Salmonella typhi
MKKKSDGDTRNFTPIRFALLCTAILLSMALLLGRVAWLQIVTPSKLVKQEDMRSLREVTTASPRGMITDREGRPLAVSVPVNAVWADPKTIISKGGVGYNERWQALASALHLSLSTLAERVNSNPAGRFIYLARQVSPQQAEWIDKLNLPGINLREESRRFYPAGHVAANLIGFTNIDGQGIEGIEKSFNAQLTGKPGSRLVRKDKFGHVIENITEVNPVPAHELQLSIDERLQTVTEDALDNAVIWNKAESGAAVLINIPTGEILSMASYPDFNPNNREGAQLDDFRNRAISDTFEPGSTVKPLVIMTALQQGIVQPDSVIDTHPFTLDGHRIRDVGYYPELTLTGILQKSSDTGVSHLSLAMPVQKLMDTYKSFGFGVPTGLGLTGESSGLLPKRRYWSDLDRATFAFGYGLMVTPLQLAHVYATIGSFGIYRPLSITKVDPPVIGTRVMPEELVHEVEHMMESVALPGGGGTKAAVRDYRIAVKTGTAKKIGDDGKYVDKYVAYTAGVAPASNPRFALVVVINNPQNGAYYGGAVSAPVFSQIMGDVLRLENVEPDGMPADSDHLLVMHGSHVAVPGS

SEQ ID NO: 14092 - protein, 263 aa, Salmonella typhi
MGKLTGKTALITGASQGIGEGIARVFARHGANLILLDISDEIEKLADELGGRGHRCTAVKADVRDFASVQAAVARAKETEGRIDILVNNAGVCRLGNFLDMSEEDRDFHIDINIKGVWNVTKAVLPEMIKRKDGRIVMMSSVTGDMVADPGETAYALSKAAIVGLTKSLAVEYAQSGIRVNAICPGYVRTPMAESIARQSNPDDPESVLTEMAKAIPLRRLADPLEVGELAAFLASDESSYLTGTQNVIDGGSTLPESVSVGV

SEQ ID NO: 14093 - protein, 127 aa, Salmonella typhi
MRHRKSGRQLNRNSSHRQAMFRNMAGSLVRHEIIKTTLPKAKELRRVVEPLITLAKTDSVANRRLAFARTRDNEIVAKLFNELGPRFASRAGGYTRILKCGFRAGDNAPMAYIELVDRSEKTEAAAE

SEQ ID NO: 14094 - protein, 329 aa, Salmonella typhi [sequence omitted]

SEQ ID NO: 14095 - protein, 206 aa, Salmonella typhi
MARYLGPKLKLSRREGTDLFLKSGVRAIDTKCKIGQAPGQHGARKPRLSDYGVQLREKQKVRRIYGVLERQFRNYYKEAARLKGNTGENLLALLEGRLDNVVYRMGFGATRAEARQLVSHKAIMVNGRVVNIASYQVSPNDVVSIREKAKKQSRVKAALELAEQREKPTWLEVDAGKMEGTYKRKPERSDLSADINEHLIVELYSK

SEQ ID NO: 14096 - protein, 129 aa, Salmonella typhi
MAKAPVCARKRVRKQVSDGVAHIHASFNNTIVTITDRQGNALGWATAGGSGFRGSRKSTPFAAQVAAERCADAVKEYGIKNLEVMVKGPGPGRESTIRALNAAGFRITNITDVTPIPHNGCRPPKKRRV

SEQ ID NO: 14097 - protein, 118 aa, Salmonella typhi
  VARIANT (1)...(118): Xaa = Any Amino Acid
MARIAGIXIPDQKHAVIALTSIYGVGKTRSKAILAAAGIAENVKISELSEEQIDTLRDEVAKFVVEGDLRREISMSIKRLMDLGCYRGLRHRRGLPVRGQRTKTNARTRKGPCKPIKK

SEQ ID NO: 14098 - protein, 443 aa, Salmonella typhi
  VARIANT (1)...(443): Xaa = Any Amino Acid
MAKQPGLDFQSAKGGLGELKRRLLFVIGALIVFRIGSFIPIPGIDAAVLAKLLEQQRGTIIEMFNMFSGGALSRASIFALGIMPYISASIIIQLLTVVHPTLAEIKKEGESGRRKISQYTRYGTLVLAIFQSIGIATGLPNMPGMQGLVMNPGXAFYFTAVVSLVTGTMFLMWLGEQITERGIGNGISIIIFAGIVAGLPPAIAHTIEQARQGDLHFLVLLLVAVLVFAVTFFVVFVERGQRRIVVNYAKRQQGRRVYAAQSTHLPLKVNMAGVIPAIFASSIILFPATIASWFGGGTGWNWLTTISLYLQPGQPLYVLLYASAIIFFCFFYTALVFNPRETADNLKKSGAFVPGIRPGEQTAKYIDKVMTHLTLVGALYITFICLIPEFMRDAMKVPFYFGGTSLLIVVVVIMDFMAQVQTLMMSSQYESALKKANLKGYGR

SEQ ID NO: 14099 - protein, 144 aa, Salmonella typhi
  VARIANT (1)...(144): Xaa = Any Amino Acid
MRLNTLSPAEGSKKAGKRLGRGIGSGLGKTGGRGHKGQKSRSXGGVRRGFEGGQMPLYRRLPKFGFTSRKAAITAEVRLSDLAKVEGGVVDLNTLKAANIIGIQIEFAKVILAGEVTTPVTVRGLRVTKGARAAIEAAGGKIEE

SEQ ID NO: 14100 - protein, 273 aa, Salmonella typhi
  VARIANT (1)...(273): Xaa = Any Amino Acid
MMEAYAVFGNPIAHSKSPFIHQQFAQQLDIVHPYGRVLAPINNFINTLDAFFAAGGKGANITVPFKEEAFARSDELTERAXLAGAVXTXXRLEDGRLXGDNTDGIGLLSXLERXNFIRPGLRILLIGAXGASRGVLLPLLSLDCAVTITNRTASRAEALAKIFAHTGSVHAMDMDKLDGCEFDLIINATSSGIRGEIPAIPASLIHPSLCCYDMFYQKGNTPFLSWCVQQGAKRYADGLGMLVGQAAHAVLLWHGVLPQVEPVIKXLQQELLA

SEQ ID NO: 14101 - protein, 167 aa, Salmonella typhi; identical to SEQ ID NO: 10342

SEQ ID NO: 14102 - protein, 117 aa, Salmonella typhi
MDKKSARIRRATRARRKLKELGATRLVVHRTPRHIYAQVIAPNGSEVLVAASTVEKAIAEQLKYTGNKDAAAAVGKAVAERALEKGIKDVSFDRSGFQYHGRVQALADAAREAGLQF

SEQ ID NO: 14103 - protein, 177 aa, Salmonella typhi
MSRVAKAPVVVPAGVDVKINGQVITIKGKNGELTRTLNDAVEVKHADNALTFGPRDGYADGWAQAGTARALLNSMVIGVTEGFTKKLQLVGVGYRAAVKGNVVNLSLGFSHPVDHQLPAGITAECPTQTEIVLKGADKQVIGQVAADLRAYRRPEPYKGKGVRYADEVVRTKEAKKK

SEQ ID NO: 14104 - protein, 130 aa, Salmonella typhi
  VARIANT (1)...(130): Xaa = Any Amino Acid
MSMQDPIADMLTRIRNGQAANKAAVTMPSSKLKVAIANVLKEEGFIEDFXVEGDTKPELELTLKYFQGKAVVESIQRVSRPGLRIYKRKDELPKVMAGLGIAVVSTSKGVMTDRAARQAGLGGEIICYVA

SEQ ID NO: 14105 - protein, 101 aa, Salmonella typhi
MAKQSMKAREVKRVALADKYFAKRAELKAIISDVNATDEDRWNAVLKLQTLPRDSSPSRQRNRCRQTGRPHAFLRKFGLSRIKVREAAMRGEIPGLKKASW

SEQ ID NO: 14106 - protein, 179 aa, Salmonella typhi
  VARIANT (1)...(179): Xaa = Any Amino Acid
MAKLHDYYKDEVVNKLMTEFNYNSVMQVPRVEKITLNMGVGEAIADXKLLDNAAADLTAISGQKPLITKARKSVAGFKIRXGYPIGCKVTLRGERMWEFFERLITIAVPRIRDFRGLSAKSFDGRGNYSMGVREQIIFPEIDYDKVDRVRGLDITITTTAKSDEEGRALLAAFDFPFRK

SEQ ID NO: 14107 - protein, 104 aa, Salmonella typhi
  VARIANT (1)...(104): Xaa = Any Amino Acid
MAAXIRRDDEVIVLTGKDKGKRGKVKNVLSSGXVIVEXINLVKXHQKPVPALNQPGGIVEKEAAIQXSNVAIFNTATGKADRVGFRFEDGKKVRFFKSNSETIK

SEQ ID NO: 14108 - protein, 123 aa, Salmonella typhi
  VARIANT (1)...(123): Xaa = Any Amino Acid
MIQEQTMLNVADNSGARRVMCIKVLGGSHRRYAGVGDIIKITIKEAIPRGKVKKGDVLKAVVVRTKKGVRRPDGSVIRFDGNACVILNNNSEQPIGTRIFGPVTRELRNEKFMKXISLAPEVL

SEQ ID NO: 14109 - protein, 217 aa, Salmonella typhi
MSEAMMWLLVRGVWETLAMTFVSGFFGFVIGLPVGVLLYVTRPGQIMENARLYRSLSAVVNIFRSIPFIILLVWMIPFTRIIVGTSIGLQAAIVPLTVGAAPFIARIVENALLEIPAGLIEASRAMGATPLQIVRKILLPEALPGLVNAATITLITLVGYSAMGGAVGAGGLGQIGYQYGYIGYNATVMNTVLVLLVVLVYLIQLSGDRIVRAVTHK

SEQ ID NO: 14110 - protein, 343 aa, Salmonella typhi
  VARIANT (1)...(343): Xaa = Any Amino Acid
MIKLSNITKVFQQGARTIQALNNVSLHVPAGQIYGVIGASGAGKSTLIRCVNLLERPTEGSVMVGGQELTTLSESGLTKARRQIGMIFQHFNLLSSRTVFGNVALPLELDNTPKEEIKRRVTELLDLVGLGDKHDSYPANLSGGQKQRVAIARALASNPKVLLCDEATSALDPATTRSILELLKDINRRLGLTILLITHEMDVVXRICDCVXVISNGELIEXDXXSEVFSHXXTPLAQKXXQSTLHLDIPEDYQARMKASPETDSVPMLRMEFTGQSVDAPLLSETARRFNVNNNIISAQMDYAGGVKFGIMLTEMHGTQEETQAAIAWLQDHHVKVEVLGYV
